(19) United States
(12) Patent Application Publication
(10) Pub. No.: US 2004/0067554 A1
(43) Pub. Date: Apr. 8, 2004

(54) Nucleotide sequences of moraxella catarrhalis genome

(76) Inventors: Robert E. Lagace, Belmont, CA (US); Chandra Patterson, Menlo Park, CA (US); Kim L. Berg, Palo Alto, CA (US)

Correspondence Address: KNOBBE MARTENS OLSON & BEAR LLP, 2040 MAIN STREET, FOURTEENTH FLOOR, IRVINE, CA, 92614, US

(21) Appl. No.: 10/672,787

(22) Filed: Sep. 26, 2003

Related U.S. Application Data
(63) Continuation of application No. 09/596,002, filed on Jun. 16, 2000, now Pat. No. 6,632,636.
(60) Provisional application No. 60/140,121, filed on Jun. 18, 1999.

(51) Int. Cl. C12P 21/06

(52) U.S. Cl. 435/69.1

(57) ABSTRACT

The present invention provides the genomic sequences of a library of purified, polynucleotides, or their complements, comprising the genome of Moraxella catarrhalis. The invention also provides the identification of open reading frames contained within the polynucleotides of the library. The present invention further provides for the use of the polynucleotides, their complements or fragments, and proteins or portions thereof for identifying ligands and useful diagnostic and therapeutic compositions. In addition the invention provides for vectors, host cell sand methods for producing M. catarrhalis proteins or portions thereof.

### CROSS-REFERENCE TO RELATED APPLICATIONS

[0001] This application is a continuation of U.S. patent application Ser. No. 09/596,002, filed on Jun. 16, 2000, which claims priority under 35 U.S.C. §119(e) to U.S. Provisional Application Serial No. 60/140,121, filed Jun. 18, 1999, both of which are hereby expressly incorporated herein by reference in their entireties.

[0002] A portion of the disclosure of this patent document contains material which is subject to copyright protection. The copyright owner has no objection to the facsimile reproduction by anyone of the patent document or the patent disclosure, as it appears in the Patent and Trademark Office patent file or records, but otherwise reserves all copyright rights whatsoever.

### TECHNICAL FIELD

[0003] The present invention discloses nucleotide sequences from the genome of Moraxella catarrhalis. These sequences may be used in various assays and in the development of diagnostic and therapeutic agents.

### Sequence Listing

[0004] The present application is being filed along with duplicate copies of a CD-ROM marked “Copy 1” and “Copy 2” containing a Sequence Listing in electronic format. The duplicate copies of the CD-ROM each contain a file entitled ELITRA.025C1.txt created on Sep. 26, 2003 which is 2,330,432 bytes in size. The information on these duplicate CD-ROMs is incorporated herein by reference in its entirety.

### BACKGROUND OF INVENTION

[0005] All animals coexist with an indigenous microflora. Beginning shortly after birth, the gastrointestinal tract, lungs, and other areas of the human body are colonized by different bacterial species. A large number of factors operate to maintain symbiotic, host-microbe balance. These include the physical barriers of skin and mucosal surfaces and both nonspecific and highly specific aspects of the immune system. When host-microbe balance becomes disturbed, infection may ensue. Virulence, the ability of a microbe to produce infection, is related to a variety of complex mechanisms of disease induction. Some organisms are highly virulent and cause clinical illness when they colonize most or all hosts. Alternatively, when host defenses are compromised, normally symbiotic microbes can induce serious, or even life-threatening, infections. Thus, infection is generally a consequence of the interaction between a relatively virulent microbe and a normal host or between a relatively less virulent microbe and a host with some degree of transient or permanent immunological impairment.

[0006] M. catarrhalis (Branhamella catarrhalis) is a large, aerobic, gram-negative diplococcus normally found among the bacterial flora of human upper airways. It is nonmotile and possesses fimbriae. Collonies are regularly friable and nonadherent and grow well on blood or chocolate agar. Unlike many other pathogenic bacteria, M. catarrhalis shows a high degree of homogeneity in its outer membrane proteins. This usually harmless parasite of the mucous membranes may behave as an opportunistic pathogen when microbehost balance is perturbed. Following infection, host antibodies directed against one or more of the microbial outer-membrane proteins are detectable in the serum.

[0007] M. catarrhalis is known to cause acute, localized infections such as otitis media, sinusitis, and bronchopulmonary infection and life-threatening, systemic diseases including endocarditis and meningitis. The presence of bacterial endotoxin and host histamine and chemotactic factors are major indicators of M. catarrhalis pathogenicity.

[0008] M. catarrhalis can be isolated from the upper respiratory tract of 50% of healthy school children and 7% of healthy adults. In children with otitis media, colonization increases to 86%, and it is the third most common bacterial isolate. It causes 10-15% of otitis media and sinusitis. Infections of the maxillary sinuses, middle ears, or bronchi may occur through contiguous spread of the microbes. M. catarrhalis causes a large proportion of lower respiratory tract infections in elderly patients with chronic obstructive pulmonary diseases and is exceeded only by Haemoohilus influenzae and Streptococcus pneumoniae as a causative agent of acute purulent exacerbations of chronic bronchitis.

[0009] Pneumonia due to M. catarrhalis, like that of H. influenzae or S. pneumoniae, begins with aspiration of the bacteria. Failure or absence of appropriate host defense allows the bacteria to replicate and produce an inflammatory response in the alveoli. Because of mandatory immunosuppression, organ transplant recipients can develop moderate to severe M. catarrhalis pneumonia very rapidly. Bloodstream invasion is less characteristic of M. catarrhalis than pneumococcal infection, but nearly 50% of M. catarrhalis pneumonia patients die within 3 months of onset.

[0010] M. catarrhalis is treated with antibiotic agents including penicillin-clavulanic acid combinations, cephalosporins, tetracycline, erythromycin, chloramphenicol, trimethoprim-sulfamethoxazole, and quinolones. Over 85% of M. catarrhalis clinical isolates have been reported to be resistant to penicillin. Moreover, the microbe protects itself by binding to the first subcomponent of the complement system (Clq) which inactivates the C1 complex or by inactivating the terminal, lytic complement complex via a protein on the outer cell wall surface. Resistance is mediated by two closely related β-lactamases, BRO-1, present in 90% of resistant isolates and BRO-2, present in 10%. These enzymes are active against penicillin, ampicillin, and amoxicillin, less active against cephalosporins, and bind avidly to clavulanic acid and sublactam. Tetracycline resistant strains are increasing in Europe and Asia and have been documented in the United States. Ampicillin, which had been universally effective in treating M. catarrhalis pneumonia, can no longer be used.

[0011] M. catarrhalis physiology and pathogenicity are reviewed in: Holt et al. (1994) Bergey's Manual of Determinative Bacteriology, Williams and Wilkins, Baltimore Md.; Cullmann (1997) Med Klin 92(3):162-166; Isselbacher et al. (1994) Harrison's Principles of Internal Medicine, McGraw-Hill, New York N.Y.; Murray (1995) Manual of Clinical Microbiology, ASM Press, Washington D.C.; and Shulman et al. (1997) The Biologic and Clinical Basis of Infectious Diseases, W B Saunders, Philadelphia Pa.

[0012] In view of the conditions or diseases associated with M. catarrhalis, it would be advantageous to provide specific methods for the diagnosis, prevention, and treatment of diseases attributed to M. catarrhalis. Relevant methods would be based on the expression of M. catarrhalis-derived nucleic acid sequences. Such traits as virulence, acquisition of resistance factors, and effects of treatment using particular therapeutic agents may be characterized by under- or over-expression of nucleic acid sequences as revealed using PCR, hybridization or microarray technologies. Treatment for diseases attributed to M. catarrhalis can then be based on expression of these identified sequences or their expressed proteins, and efficacy of any particular therapy and development of resistance monitored. The information provided herein provides the basis for understanding the pathogenicity of M. catarrhalis and treating and monitoring the treatment of diseases caused by M. catarrhalis.

### SUMMARY OF THE INVENTION

[0013] The present invention relates to a genomic library comprising the combination of nucleic acid molecules from Moraxella catarrhalis, presented as SEQ ID NOs:1-41. The library substantially provides the nucleic acid molecules comprising the genome of M. catarrhalis, and the nucleic acid molecules provide a plurality of open reading frames (ORFs). The ORFs uniquely identify structural, functional, and regulatory genes of M. catarrhalis. The invention encompasses oligonucleotides, fragments, and derivatives of the M. catarrhalis nucleic acid molecules, and sequences complementary to the nucleic acid molecules listed in the Sequence Listing.

[0014] M. catarrhalis nucleic acid molecules, fragments, derivatives, oligonucleotides, and complementary sequences thereof, can be used as probes to detect, amplify, or quantify M. catarrhalis genes, ORFs, cDNAs, or RNAs in biological, solution or substrate-based, assays or as compositions in diagnostic kits. The invention contemplates the use of such diagnostic probes to identify the presence of M. catarrhalis sequence in a sample or to screen for virulence factors and mutations.

[0015] The invention also provides for the comparison of the M. catarrhalis genomic library or the encoded proteins with genomes, individual DNA sequences, or proteins from other Moraxella species or strains, other bacteria, and other organisms to identify virulence factors, regulatory elements, drug targets, and to characterize genomic organization. In another aspect, the present invention provides for the use of computer databases to make such comparisons.

[0016] The invention further provides host cells and expression vectors comprising nucleic acid molecules of the invention and methods for the production of the proteins they encode. Such methods include culturing the host cells under conditions for expression of M. catarrhalis protein and recovering the protein from cell culture. The invention still further provides purified M. catarrhalis protein of which at least a portion is encoded by a nucleic acid molecule selected from the nucleic acid molecules of the Sequence Listing.

[0017] The subject invention provides a method of screening a library or a plurality of molecules or compounds for specific binding to a M. catarrhalis nucleic acid molecule or fragment thereof or protein or portion thereof, to identify at least one ligand which specifically binds the M. catarrhalis nucleic acid molecule or protein. Such a method comprises the steps of combining the M. catarrhalis nucleic acid molecule or protein with a library or a plurality of molecules or compounds under conditions to allow specific binding and detecting M. catarrhalis nucleic acid molecule or protein bound to at least one molecule or compound, thereby identifying a ligand which specifically binds the nucleic acid molecule or protein. Suitable libraries of ligands comprise aptamers, DNA molecules, RNA molecules, peptide nucleic acids, peptides, mimetics, proteins, agonists, antagonists, antibodies, inhibitors, immunoglobulins, pharmaceutical agents, and drug compounds.

[0018] The subject invention also provides a method of purifying a ligand from a sample. Such a method comprises the steps of combining the M. catarrhalis nucleic acid molecule or protein with a library or a plurality of molecules or compounds under conditions to allow specific binding, detecting M. catarrhalis nucleic acid molecule or protein bound to at least one molecule or compound, recovering the bound M. catarrhalis nucleic acid molecule or protein and separating the bound M. catarrhalis nucleic acid molecule or protein from the ligand, thereby obtaining purified ligand.

[0019] The invention further comprises an antibody specific for a purified M. catarrhalis protein or a portion thereof which is encoded by an M. catarrhalis nucleic acid molecule selected from the Sequence Listing. Antibodies produced against M. catarrhalis protein may be used diagnostically for the detection of M. catarrhalis proteins in biological, solution- or substrate-based, samples and therapeutically to neutralize the activity of an M. catarrhalis protein expressed during infections caused by M. catarrhalis.

### DESCRIPTION OF THE SEQUENCE LISTING AND TABLES

[0020] The Sequence Listing is a compilation of the consensus sequences of contiguous sequences (contigs) or groups of overlapping sequences, assembled from individual sequences obtained by sequencing genomic clone inserts of a randomly generated M. catarrhalis DNA library. Each assembled contig or singlet is identified by a sequence identification number (SEQ ID NO) and by the contig number which it represents.

[0021] Table 1 lists the assembled M. catarrhalis contiguous sequences prepared as described in the Examples. The first column contains the number of the contig, which is also SEQ ID NO, listed in ascending order. The second column contains the length of the nucleic acid molecule. The third and fourth columns contain the start and stop nucleotides, respectively, for any open reading frames (ORFs) in the contig. The fifth column contains the Locus ID. The sixth column lists the GenBank identification number of the closest homolog, if any. The seventh column gives the P-value for the match to the homolog. The last column contains the description of the homolog. Orphans or LURs have no GenBank homologs.

[0022] Table 2 shows the order of the contigs or singlets comprising the M. catarrhalis genome.

### DESCRIPTION OF THE PREFERRED EMBODIMENTS

[0023] It is understood that this invention is not limited to the particular machines, materials and methods described. It is also to be understood that the terminology used herein is for the purpose of describing particular embodiments only and is not intended to limit the scope of the present invention which will be limited only by the appended claims. As used herein, the singular forms “a”, “an”, and “the” include plural reference unless the context clearly dictates otherwise. For example, a reference to “a host cell” includes a plurality of such host cells known to those skilled in the art.

[0024] All patents and publications cited for the purpose of describing and disclosing the cell lines, protocols, reagents and vectors which might be used in connection with the invention are expressly incorporated by reference. Citation is for the purpose of providing the best description of the invention and is not to be construed as an admission that the invention is not entitled to antedate such disclosure.

[0025] Definitions

[0026] “Biologically active” refers to a protein having structural, immunological, regulatory, or chemical functions of a naturally occurring, recombinant, or synthetic molecule.

[0027] “Complementary” refer to the natural hydrogen bonding by base pairing between purines and pyrimidines. For example, the sequence A-C-G-T forms hydrogen bonds with its complements T-G-C-A or U-G-C-A. The degree of complementarity between nucleic acid strands affects the efficiency and strength of the hybridization and amplification reactions.

[0028] “Derivative” refers to the chemical modification of a nucleic acid or amino acid molecule. Chemical modifications can include replacement of hydrogen by an alkyl, acyl, or amino group or glycosylation, pegylation, or any similar process which retains or enhances biological activity, stability, or lifespan of the molecule.

[0029] “Fragment” refers to an Incyte clone or any part of a nucleic acid molecule which retains a usable, functional characteristic. Useful fragments include oligonucleotides which may be used in hybridization or amplification technologies or to regulate replication, transcription or translation.

[0030] “Hybridization complex” refers to a complex between two nucleic acid molecules by virtue of the formation of hydrogen bonds between purines and pyrimidines.

[0031] “Ligand” refers to any molecule or compound which will bind to a complementary site on a nucleic acid molecule or protein.

[0032] “Modulates” refers to a change in activity (biological, chemical, or immunological) or lifespan resulting from specific binding between a molecule or compound and either a nucleic acid molecule or a protein.

[0033] “Molecules” is used substantially interchangeably with the terms agents and compounds. Such molecules modulate the activity of nucleic acid molecules or proteins of the invention and may be composed of at least one of the following: inorganic and organic substances including cofactors, nucleic acids, proteins, carbohydrates, fats, and lipids.

[0034] “Nucleic acid molecule” is substantially interchangeable with the term polynucleotide and may refer to a probe, a fragment of DNA or RNA of genomic or synthetic origin. Such molecules may be double-stranded or single-stranded and may be engineered into vectors to perform a particular activity such as transcription.

[0035] “Oligonucleotide” is substantially equivalent to the terms “amplimer”, “primer”, “oligomer”, and “element”, and is preferably single stranded.

[0036] “Protein” refers to an amino acid sequence, oligopeptide, peptide, polypeptide or portions thereof whether naturally occurring or synthetic.

[0037] “Portion” refers to any part of a protein used for any purpose, but especially for the screening of a library of molecules or compounds which specifically bind to that portion or for the production of antibodies.

[0038] “Sample” is used in its broadest sense. A sample containing nucleic acid molecules may comprise a bodily fluid; an extract from a cell, chromosome, organelle, or membrane isolated from a cell; genomic DNA, RNA, or cDNA in solution or bound to a substrate; a cell; a tissue; a tissue print; a hair, and the like.

[0039] “Substantially purified” refers to nucleic acid molecules or proteins that are isolated or separated from their natural environment and are about 60% free to about 90% free from other components with which they are naturally associated.

[0040] “Substrate” refers to any rigid or semi-rigid support to which nucleic acid molecules or proteins are bound and includes membranes, filters, chips, slides, wafers, fibers, magnetic or nonmagnetic beads, gels, capillaries or other tubing, plates, polymers, and microparticles with a variety of surface forms including wells, trenches, pins, channels and pores.

[0041] The Invention

[0042] The majority of the Moraxella catarrhalis genome was sequenced using a strategy of shotgun sequencing. Genomic DNA was mechanically sheared, treated with enzyme to create blunt ends, gel-purified, and cloned into modified PBLUESCRIPT vectors (Stratagene, La Jolla Calif.). The vectors were transformed into E. coli cells and grown overnight. Colonies were picked, and plasmid DNA was isolated. Templates were prepared and sequenced, sequences were assembled into contiguous sequences (contigs), and open reading frames were identified.

[0043] The invention relates to a Moraxella catarrhalis genomic DNA library comprising a combination of nucleic acid molecules, SEQ ID NOs:1-41, and their complements. These nucleic acid molecules comprise contiguous sequences which contain annotated and unannotated reading frames (ORFs and LURs). The nucleic acid molecules or fragments and probes thereof are used in hybridization, screening, and purification assays to identify ligands and in vectors and host cells to produce the proteins which they encode. The proteins or portions thereof are also used in screening and purification assays to identify useful ligands or to produce antibodies. The molecules or compounds used in hybridization, screening, and purification assays include aptamers, DNA molecules, RNA molecules, peptide nucleic acids, peptides, mimetics, transcription factor, enhancers, repressors, regulatory proteins, agonists, antagonists, antibodies, inhibitors, immunoglobulins, pharmaceutical agents, drug compounds, and the like. The nucleic acid molecules and proteins of M. catarrhalis are compared with those of other organisms using computer algorithms and databases to select those nucleic acid molecules and proteins of potential diagnostic and therapeutic use.

[0044] Characterization and Use of the Invention

[0045] Sequencing

[0046] Methods for sequencing nucleic acid molecules are well known in the art and may be used to practice any of the embodiments of the invention. These methods employ enzymes such as the Klenow fragment of DNA polymerase I, SEQUENASE, Taq DNA polymerase, thermostable T7 DNA polymerase (Amersham Pharmacia Biotech (APB), Piscataway N.J.), or combinations of polymerases and proofreading exonucleases such as those found in the ELONGASE amplification system (Life Technologies, Rockville Md.). Preferably, sequence preparation is automated with machines such as the HYDRA microdispenser (Robbins Scientific, Sunnyvale Calif.), MICROLAB 2200 system (Hamilton, Reno Nev.), and the DNA ENGINE thermal cycler (MJ Research, Watertown Mass.). Machines used for sequencing include the ABI 3700, 377 or 373 DNA sequencing systems (PE Biosystems, Foster City Calif.), the MEGABACE 1000 DNA sequencing system (APB), and the like. The sequences may be analyzed using a variety of algorithms which are well known in the art and described in Ausubel (1997; Short Protocols in Molecular Biology, John Wiley & Sons, New York N.Y., unit 7.7) and in Meyers (1995; Molecular Biology and Biotechnology, Wiley VCH, New York N.Y., pp. 856-853).

[0047] Shotgun sequencing methods are well known in the art and use thermostable DNA polymerases and heat-labile DNA polymerases. A detailed procedure is provided in the Examples. Prefinished sequences (incomplete assembled sequences) are cross-compared for identity using various algorithms or programs such as CONSED (Gordon (1998) Genome Res. 8:195-202), GELVIEW Fragment Assembly system (Genetics Computer Group, Madison Wis., and PHRAP (Phil Green, University of Washington, Seattle Wash.). Contaminating sequences, including vector or chimeric sequences, can be masked, removed or restored, in the process of turning the prefinished sequences into finished sequences.

[0048] Extension of a Nucleic Acid Sequence

[0049] The sequences of the invention may be extended using various PCR-based methods known in the art. For example, the XL-PCR kit (PE Biosystems), nested primers, and commercially available cDNA or genomic DNA libraries (Life Technologies and Clontech (Palo Alto Calif.), respectively) may be used to extend the nucleic acid sequence. For all PCR-based methods, primers may be designed using commercially available software, such as OLIGO 4.06 software (National Biosciences, Plymouth Minn.) to be about 22 to 30 nucleotides in length, to have a GC content from about 40-45%, and to anneal to a target molecule at temperatures from about 55 C to about 68 C. When extending a sequence to recover untranslated, regulatory elements, it is preferable to use genomic, rather than cDNA libraries.

[0050] Use of M. catarrhalis Nucleic Acid Molecules

[0051] Hybridization

[0052] The M. catarrhalis nucleic acid molecules and fragments thereof can be used in various hybridization technologies for various purposes. Hybridization probes may be designed or derived from a highly unique region such as the 5′ untranslated sequence preceding the initiation codon or from a conserved coding region encoding a specific protein signature or motif and used in protocols to identify naturally occurring molecules encoding a particular M. catarrhalis protein, allelic variants, or related molecules. The probe should preferably have at least 50% sequence identity to any naturally occurring nucleic acid sequences. The probe may be a single stranded DNA or RNA molecule, produced biologically or synthetically, and labeled using oligolabeling, nick translation, end-labeling, or PCR amplification in the presence of at least one labeled nucleotide. A vector containing the nucleic acid molecule or a fragment thereof may be used to produce an mRNA probe in vitro by addition of an RNA polymerase and labeled nucleotides. These procedures may be conducted using commercially available kits such as those provided by APB.

[0053] The stringency of hybridization is determined by G+C content of the probe, salt concentration, and temperature. In particular, stringency can be increased by reducing the concentration of salt or raising the hybridization temperature. In solutions used for some membrane based hybridizations, addition of an organic solvent such as formamide allows the reaction to occur at a lower temperature. Hybridization can be performed at low stringency with buffers, such as 5×SSC with 1% sodium dodecyl sulfate (SDS) at 60 C, which permits the formation of a hybridization complex between nucleic acid sequences that contain some mismatches. Subsequent washes are performed at increased stringency with buffers such as 0.2×SSC with 0.1% SDS at either 45 C (medium stringency) or 68 C (high stringency). At high stringency, hybridization complexes will remain stable only where the nucleic acid molecules are completely complementary. In some membrane-based hybridizations, 35-50% formamide can be added to the hybridization solution to reduce the temperature at which hybridization is performed. Background signals can be reduced by the use of other detergents such as Sarkosyl or TRITON X-100 (Sigma-Aldrich, St. Louis Mo.) and a blocking agent such as denatured salmon sperm DNA. Selection of components and conditions for hybridization are well known to those skilled in the art and are reviewed in Ausubel (supra) and in Sambrook et al. (1989; Molecular Cloning A Laboratory Manual, Cold Spring Harbor Press, Plainview N.Y.).

[0054] Microarrays may be prepared and analyzed using methods known in the art. Oligonucleotides or fragments of a nucleic acid molecule may be used as either probes or targets. The microarray can be used to monitor the expression level of large numbers of genes simultaneously and to identify genetic variants, mutations, and single nucleotide polymorphisms. Such information may be used to determine gene function; to understand the genetic basis of a condition, disease, or disorder; to diagnose a condition, disease, or disorder; and to develop and monitor the activities of therapeutic agents used to treat the condition, disease, or disorder. (See, eg, Brennan et al. (1995) U.S. Pat. No. 5,474,796; Schena et al. (1996) Proc Natl Acad Sci 93:10614-10619; Baldeschweiler et al. (1995) PCT application WO95/251116; Shalon et al. (1995) PCT application WO95/35505; Heller et al. (1997) Proc Natl Acad Sci 94:2150-2155; and Heller et al. (1997) U.S. Pat. No. 5,605,662.)

[0055] Hybridization probes are also useful in mapping the naturally occurring genomic sequence. The probes may be hybridized to: 1) a particular chromosome, 2) a specific region of a chromosome, 3) an artificial chromosome constructions such as human artificial chromosomes (HACs), yeast artificial chromosomes (YACs), bacterial artificial chromosomes (BACs), bacterial PI constructions, single chromosomes from eukaryotic species, or 5) DNA libraries made from any of these sources.

[0056] Expression

[0057] A nucleic acid molecule encoding a M. catarrhalis protein may be cloned into a vector and used to express the protein or portions thereof in host cells. The nucleic acid sequence can be engineered by such methods as DNA shuffling (U.S. Pat. No. 5,830,721) and site-directed mutagenesis to create new restriction sites, alter glycosylation patterns, change codon preference to increase expression in a particular host, produce splice variants, extend half-life, and the like. The expression vector may contain transcriptional and translational control elements (promoters, enhancers, specific initiation signals, and polyadenylated sequence) from various sources which have been selected for their efficiency in a particular host. The vector, nucleic acid molecule, and regulatory elements are combined using in vitro recombinant DNA techniques, synthetic techniques, and/or in vivo genetic recombination techniques well known in the art and described in Sambrook (supra ch. 4, 8, 16 and 17).

[0058] A variety of host systems may be transformed with an expression vector. These include, but are not limited to, bacteria transformed with recombinant bacteriophage, plasmid, or cosmid DNA expression vectors; yeast transformed with yeast expression vectors; insect cell systems transformed with baculovirus expression vectors; plant cell systems transformed with expression vectors containing viral and/or bacterial elements, or animal cell systems (Ausubel, supra, unit 16).

[0059] Routine cloning, subcloning, and propagation of nucleic acid molecules can be achieved using the multifunctional PBLUESCRIPT vector (Stratagene) or PSPORT1 plasmid (Life Technologies). Introduction of a nucleic acid sequence into the multiple cloning site of these vectors disrupts the lacZ gene and allows colorimetric screening for transformed bacteria. In addition, these vectors may be useful for in vitro transcription, dideoxy sequencing, single strand rescue with helper phage, and creation of nested deletions in the cloned sequence.

[0060] For long term production of recombinant M. catarrhalis proteins, the vector can be stably transformed into competent cells of E. coli along with a selectable or visible marker gene on the same or on a separate vector. After transformation, cells are allowed to grow in enriched media containing a selective agent. Selectable markers, antimetabolite, antibiotic, or herbicide resistance genes confer resistance to the respective selective agent and allow growth and recovery of cells which successfully express the introduced sequences. Resistant clones or colonies, identified either by survival on selective media or by the expression of visible markers, such as anthocyanins, green fluorescent protein (GFP), β glucuronidase, luciferase and the like, may be propagated using culture techniques well known in the art. Visible markers are also used to quantify the amount of protein expressed by the introduced genes. Verification that the host cell contains the desired M. catarrhalis nucleic acid molecule is based on DNA-DNA or DNA-RNA hybridizations or PCR amplification.

[0061] The host cell may be chosen for its ability to modify a recombinant protein in a desired fashion. Such modifications include acetylation, carboxylation, glycosylation, phosphorylation, lipidation, acylation, and the like. Post-translational processing sequences (“prepro” forms) may also be engineered into the recombinant nucleotide sequence in order to specify protein targeting, folding, and/or activity. Different host cells available from the ATCC (Manassas Va.) which have specific cellular machinery and characteristic mechanisms for post-translational activities may be chosen to ensure the correct modification and processing of the recombinant protein.

[0062] Recovery of Proteins from Cell Culture

[0063] Heterologous moieties engineered into a vector for ease of purification include glutathione S-transferase (GST), calmodulin binding peptide (CBP), 6×His, FLAG, MYC, and the like. GST, CBP, and 6×His are purified using commercially available affinity matrices such as immobilized glutathione, calmodulin, and metal-chelate resins, respectively. FLAG and MYC are purified using commercially available monoclonal and polyclonal antibodies. A proteolytic cleavage site may be located between the desired protein sequence and the heterologous moiety for ease of separating the desired protein following purification. Methods for recombinant protein expression and purification are discussed in Ausubel (supra, unit 16) and are commercially available (Invitrogen, San Diego Calif.).

[0064] Chemical Synthesis of Peptides

[0065] Proteins or portions thereof may be produced not only by recombinant methods, but also by using chemical methods well known in the art. Solid phase peptide synthesis may be carried out in a batchwise or continuous flow process which sequentially adds α-amino and side chain-protected amino acid residues to an insoluble polymeric support via a linker group. A linker group such as methylamine-derivatized polyethylene glycol is attached to poly(styrene-co-divinylbenzene) to form the support resin. The amino acid residues are N-α-protected by acid labile Boc (t-butyloxycarbonyl) or base-labile Fmoc (9-fluorenylmethoxycarbonyl). The carboxyl group of the protected amino acid is coupled to the amine of the linker group to anchor the residue to the solid phase support resin. Trifluoroacetic acid or piperidine are used to remove the protecting group in the case of Boc or Fmoc, respectively. Each additional amino acid is added to the anchored residue using a coupling agent or pre-activated amino acid derivative, and the resin is washed. The full length peptide is synthesized by sequential deprotection, coupling of derivitized amino acids, and washing with dichloromethane and/or N,N-dimethylformamide. The peptide is cleaved between the peptide carboxy terminus and the linker group to yield a peptide acid or amide. (Novabiochem 1997/98 Catalog and Peptide Synthesis Handbook, San Diego Calif., pp. S1-S20). Automated synthesis may also be carried out on machines such as the ABI 431A peptide synthesizer (PE Biosystems). A protein or portion thereof may be substantially purified by preparative high performance liquid chromatography and its composition confirmed by amino acid analysis or by sequencing (Creighton (1984) Proteins, Structures and Molecular Properties, W H Freeman, New York N.Y.).

[0066] Preparation and Screening of Antibodies

[0067] Various hosts including goats, rabbits, rats, mice, humans, and others may be immunized by injection with M. catarrhalis protein or any portion thereof. Adjuvants such as Freund's, mineral gels, and surface active substances such as lysolecithin, pluronic polyols, polyanions, peptides, oil emulsions, keyhole limpet hemacyanin (KLH), and dinitrophenol may be used to increase immunological response. The oligopeptide, peptide, or portion of protein used to induce antibodies should consist of about five to fifteen amino acids which are identical to a portion of the natural protein. Oligonucleotides may be fused with proteins such as KLH in order to produce antibodies to the chimeric molecule.

[0068] Monoclonal antibodies may be prepared using any technique which provides for the production of antibodies by continuous cell lines in culture. These include, but are not limited to, the hybridoma technique, the human B-cell hybridoma technique, and the EBV-hybridoma technique. (See, eg, Kohler et al. (1975) Nature 256:495-497; Kozbor et al. (1985) J Immunol Methods 81:31-42; Cote et al. (1983) Proc Natl Acad Sci 80:2026-2030; and Cole et al. (1984) Mol Cell Biol 62:109-120.)

[0069] Alternatively, techniques described for the production of single chain antibodies may be adapted, using methods known in the art, to produce epitope specific single chain antibodies. Antibody fragments which contain specific binding sites for epitopes of the M. catarrhalis protein may also be generated For example, such fragments include, but are not limited to, F(ab′)₂ fragments produced by pepsin digestion of the antibody molecule and Fab fragments generated by reducing the disulfide bridges of the F(ab′)₂ fragments. Alternatively, Fab expression libraries may be constructed to allow rapid and easy identification of monoclonal Fab fragments with the desired specificity (Huse et al. (1989) Science 246:1275-1281).

[0070] The M. catarrhalis protein may be used in screening assays of phage mid or B-lymphocyte immunoglobulin libraries to identify antibodies having the desired specificity. Numerous protocols for competitive binding or immunoassays using either polyclonal or monoclonal antibodies with established specificities are well known in the art. Such immunoassays typically involve the measurement of complex formation between the protein and its specific antibody. A two-site, monoclonal-based immunoassay utilizing monoclonal antibodies reactive to two non-interfering epitopes is preferred, but a competitive binding assay may also be employed (Pound (1998) Immunochemical Protocols, Humana Press, Totowa N.J.).

[0071] Labeling of Molecules for Assay

[0072] A wide variety of labels and conjugation techniques are known by those skilled in the art and may be used in various nucleic acid molecule, protein, and antibody assays. Synthesis of labeled molecules may be achieved using Promega (Madison Wis.) or APB kits for incorporation of a labeled nucleotide such as ³²p-dCTP, Cy3-dCTP or Cy5dCTP (APB) or amino acid such as ³⁵S-methionine (APB). Nucleotides and amino acids may be directly labeled with a variety of substances including fluorescent, chemiluminescent, or chromogenic agents and the like, by chemical conjugation to amines, thiols and other groups present in the molecules using reagents such as BIODIPY or FITC (Molecular Probes, Eugene Oreg.).

[0073] Diagnostics

[0074] The nucleic acid molecules, fragments, oligonucleotides, complementary RNA and DNA molecules, and peptide nucleic acids (PNAs) may be used to detect and quantify differential gene expression, absence/presence vs. excess, of mRNAs or to monitor mRNA levels following drug treatment. Conditions, diseases or disorders associated with M. catarrhalis gene expression may include conditions and diseases such as allergies, asthma, bronchitis, chronic obstructive pulmonary disease, emphysema, endocarditis, hypereosinophilia, meningitis, otitis media, pneumonia, sinusitis, and various respiratory distress syndromes. The diagnostic assay may use hybridization or amplification technology to compare gene expression in a biological sample from a patient to expression in disease and control standards in order to detect differential gene expression. Qualitative or quantitative methods for this comparison are well known in the art.

[0075] For example, the nucleic acid molecule, fragment, or probe may be labeled by standard methods and added to a sample from a patient under conditions for the formation of hybridization complexes. After an incubation period, the sample is washed and the amount of label (or signal) associated with hybridization complexes, is quantified and compared with a standard value. If the amount of label in the patient sample is significantly altered in comparison to the standard value, then the presence of elevated amounts of M. catarrhalis is responsible for the associated condition or disease.

[0076] In order to provide a basis for the diagnosis of a condition, disease or disorder associated with gene expression, a normal or standard expression profile is established. This may be accomplished by combining a biological sample taken from normal subjects, animal or more preferably human, with a probe under conditions for hybridization or amplification. Standard hybridization may be quantified by comparing the values obtained using normal subjects with values from an experiment in which a known amount of a substantially purified target sequence is used. Standard values obtained in this manner may be compared with values obtained from samples from patients who are symptomatic for a particular condition or diseases listed above. Deviation from standard values toward those associated with a particular diagnosed condition is used to diagnose the patient.

[0077] Such assays may also be used to evaluate the efficacy of a particular therapeutic treatment regimen in animal studies or in a clinical trial. Once efficacy is established, these assays may be used on a regular basis to determine if the therapy is effective in an individual patient. The results obtained from successive patient assays may be used over a period ranging from several days to months.

[0078] Immunological Methods

[0079] Detection and quantification of a protein using either specific polyclonal or monoclonal antibodies are known in the art. Examples of such techniques include enzyme-linked immunosorbent assays (ELISAs), radioimmunoassays, and fluorescence activated cell sorting. A two-site, monoclonal-based immunoassay utilizing monoclonal antibodies reactive to two non-interfering epitopes is preferred, but a competitive binding assay may be employed. (See, eg, Coligan et al. (1997) Current Protocols in Immunology, Wiley-Interscience, New York N.Y.; Pound, supra.)

[0080] Therapeutics

[0081] Chemical and structural similarity, in the context of sequences, signatures and motifs, antigenic epitopes and the like, generally exists between regions of homologous proteins. Comparisons of M. catarrhalis nucleic acid molecules and proteins with those of other M. catarrhalis strains, other bacteria and other organisms allow preselection of therapeutic agents that affect the pathogenic organism without harming the host. Such therapeutic agents are useful in treating conditions and diseases such as allergies, asthma, bronchitis, chronic obstructive pulmonary disease, emphysema, endocarditis, hypereosinophilia, meningitis, otitis media, pneumonia, sinusitis, and various respiratory distress syndromes caused by M. catarrhalis. In conditions associated with increased expression or activity of M. catarrhalis nucleic acid molecule or protein, it is desirable to decrease expression or protein activity.

[0082] In one embodiment, a ligand such as an antagonist, antibody, or inhibitor identified by screening a plurality of molecules with the M. catarrhalis protein is administered to the subject to decrease the activity of the M. catarrhalis or homologous protein as it is overexpressed during pathogenesis.

[0083] In another embodiment, a composition comprising the substantially purified ligand and a pharmaceutical carrier may be administered to a subject to decrease the activity of the M. catarrhalis or homologous protein as it is overexpressed during pathogenesis. In one aspect, an antibody which specifically binds the M. catarrhalis protein may be used as a targeting or delivery mechanism for bringing a pharmaceutical agent to cells or tissues which are affected by the overexpression of the M. catarrhalis protein.

[0084] Any of the ligands may be administered in combination with other therapeutic agents. Selection of the agents for use in combination therapy may be made by one of ordinary skill in the art according to conventional pharmaceutical principles. A combination of therapeutic agents may act synergistically to effect prevention or treatment of a particular condition at a lower dosage of each agent.

[0085] Modification of Gene Expression Using Nucleic Acids

[0086] Gene expression may be modified by designing complementary or antisense molecules (DNA, RNA, or PNA) to the 5′, 3′, or intronic regions of the M. catarrhalis nucleic acid molecule. Oligonucleotides designed with reference to the transcription initiation site are preferred. Similarly, inhibition can be achieved using triple helix base-pairing which inhibits the binding of polymerases, transcription factors, or regulatory molecules (Gee et al. In: Huber and Carr (1994) Molecular and Immunologic Approaches, Futura Publishing, Mt. Kisco N.Y., pp. 163-177). A complementary molecule may also be designed to block translation by preventing binding between ribosomes and mRNA. In one alternative, a library of cDNA molecules may be screened to identify those which specifically bind a regulatory, untranslated M. catarrhalis sequence. Delivery of this inhibitory nucleotide sequence using a vector designed to be transferred from transformed M. catarrhalis cells to infectious M. catarrhalis via genetic recombination is contemplated.

[0087] Ribozymes, enzymatic RNA molecules, may also be used to catalyze the specific cleavage of an M. catarrhalis RNA. The mechanism of ribozyme action involves sequence-specific hybridization of the ribozyme molecule to complementary target RNA followed by endonucleolytic cleavage at sites such as GUA, GUU, and GUC. Once such sites are identified, an oligonucleotide with the same sequence may be evaluated for secondary structural features which would render the oligonucleotide inoperable. The suitability of candidate targets may also be evaluated by testing their hybridization with complementary oligonucleotides using ribonuclease protection assays.

[0088] Complementary nucleic acids and ribozymes of the invention maybe prepared via recombinant expression, in vitro or in vivo, or using solid phase phosphoramidite chemical synthesis. In addition, RNA molecules may be modified to increase intracellular stability and half-life by addition of flanking sequences at the 5′ and/or 3′ ends of the molecule or by the use of phosphorothioate or 2′ O-methyl rather than phosphodiesterase linkages within the backbone of the molecule. Modification is inherent in the production of PNAs and can be extended to other derivative nucleotide molecules. Either the inclusion of nontraditional bases such as inosine, queosine, and wybutosine, and/or the modification of adenine, cytidine, guanine, thymine, and uridine with acetyl-, methyl-, thio-groups renders the molecule less available to endogenous bacterial endonucleases.

[0089] Screening Assays

[0090] The M. catarrhalis nucleic acid molecule may be used to screen a plurality or a library of molecules or compounds for specific binding affinity. The molecules or compounds may be selected from aptamers, DNA molecules, RNA molecules, PNAs, peptides, transcription factors, enhancers, repressors, regulatory proteins and other ligands which modulate the activity, replication, transcription, or translation of the nucleic acid molecules in the biological system. The assay involves combining the M. catarrhalis nucleic acid molecule or a fragment thereof with molecules or compounds under conditions to allow specific binding, and detecting specific binding to identify at least one ligand which specifically binds the M. catarrhalis nucleic acid molecule.

[0091] Similarly the M. catarrhalis protein or a portion thereof may be used to screen a plurality of libraries of molecules or compounds in any of a variety of screening assays. The molecules or compounds may be selected from aptamers, DNA molecules, RNA molecules, peptide nucleic acids, peptides, mimetics, proteins, agonists, antagonists, antibodies, inhibitors, immunoglobulins, pharmaceutical agents, drug compounds, and the like. The protein or portion thereof employed in such screening may be free in solution, affixed to an abiotic or biotic substrate (eg, borne on a cell surface), or located intracellularly. Specific binding between the protein and molecule may be measured. One method for high throughput screening using very small assay volumes and very small amounts of test compound is described in U.S. Pat. No. 5,876,946, incorporated herein by reference, which teaches how to screen large numbers of molecules for specific binding to a protein.

[0092] Purification of Ligand

[0093] The M. catarrhalis nucleic acid molecule or a fragment thereof may be used to purify a ligand from a sample. A method for using a M. catarrhalis nucleic acid molecule or a fragment thereof to purify a ligand would involve combining the nucleic acid molecule or a fragment thereof with a sample under conditions to allow specific binding, detecting specific binding, recovering the bound M. catarrhalis nucleic acid molecule, and using an appropriate agent to separate the M. catarrhalis nucleic acid molecule from the purified ligand.

[0094] Similarly, the protein or a portion thereof may be used to purify a ligand from a sample. A method for using a M. catarrhalis protein or a portion thereof to purify a ligand would involve combining the protein or a portion thereof with a sample under conditions to allow specific binding, detecting specific binding between the protein and ligand, recovering the bound protein, and using an appropriate chaotropic agent to separate the protein from the purified ligand.

[0095] Pharmacology

[0096] Pharmaceutical compositions are those substances wherein the active ingredients are contained in an effective amount to achieve a desired and intended purpose. The determination of an effective dose is well within the capability of those skilled in the art. For any compound, the therapeutically effective dose may be estimated initially either in cell culture assays or in animal models. The animal model is also used to achieve a desirable concentration range and route of administration. Such information may then be used to determine useful doses and routes for administration in humans.

[0097] A therapeutically effective dose refers to that amount of a pharmaceutical agent which ameliorates the symptoms or condition. Therapeutic efficacy and toxicity of such agents may be determined by standard pharmaceutical procedures in cell cultures or experimental animals, eg, ED₅₀ (the dose therapeutically effective in 50% of the population) and LD₅₀ (the dose lethal to 50% of the population). The dose ratio between toxic and therapeutic effects is the therapeutic index, and it may be expressed as the ratio, LD₅₀/ED₅₀. Pharmaceutical compositions which exhibit large therapeutic indexes are preferred. The data obtained from cell culture assays and animal studies are used in formulating a range of dosage for human use.

[0098] Rational Drug Design

[0099] The goal of rational drug design is to produce structural analogs of biologically active M. catarrhalis proteins of interest or of ligands with which they interact. Any of these examples can be used to fashion drugs which are more active or stable forms of the protein, or which enhance or interfere with the function of a protein in vivo (Hodgson (1991) Bio/Technology 9:19-21).

[0100] In one approach, the three-dimensional structure of an M. catarrhalis protein, or of an M. catarrhalis protein-inhibitor complex, is determined by X-ray crystallography, by computer modeling or, most typically, by a combination of the two approaches. Both the shape and charges of the protein must be ascertained to elucidate the structure and to determine active site(s). Less often, useful information regarding the structure of a protein may be gained by modeling based on the structure of homologous proteins. In both cases, relevant structural information is used to design analogous M. catarrhalis protein-like molecules or to identify efficient inhibitors.

[0101] Useful examples of rational drug design may include molecules which have improved activity or stability, as shown by Braxton et al. (1992, Biochem 31:77967801), or which act as inhibitors, agonists, or antagonists of M. catarrhalis peptides, as shown by Athauda et al. (1993, J Biochem 113:742-746).

[0102] It is also possible to isolate a target-specific antibody, selected by functional assay, as described above, and then to solve its crystal structure. This approach, in principle, yields a pharmacore upon which subsequent drug design can be based. It is possible to bypass protein crystallography altogether by generating anti-idiotypic antibodies (anti-ids) to a functional, pharmacologically-active antibody. As a mirror image of a mirror image, the binding site of the anti-id is an analog of the original receptor. The anti-id can be used to identify and isolate peptides from banks of chemically or biologically-produced peptides. The isolated peptides act as the pharmacore.

### EXAMPLES

### Example 1

### Shotgun Sequencing Strategy

[0103] The strategy for sequencing the M. catarrhalis genome was a modification of the shotgun approach to whole genome sequencing described by Lander and Waterman (1988 Genomics 2:231). They applied the equation for the Poisson distribution pₓ=m^{x}e^{-m}/x!, where x is the number of occurrences of an event, m is the mean number of occurrences, and Pₓ is the probability that any given base is not sequenced after a certain amount of random sequence has been generated. If L is the genome length, n is the number of clones insert ends sequenced, and w is the sequencing read length, then m=nw/L, and the probability that no clone originates at any of the w bases preceding a given base, ie, the probability that a base is not sequenced, is p₀=e^{-m}. For sequencing where p₀>0, the total gap length is Le^{-m}, and the average gap size is L/n.

[0104] The shotgun approach has recently been used to sequence the genomes of H. influenzae (Fleischmann et al. (1995) Science 269:496; WO 96/33276), Mycoplasma genitalium (Fraser et al. (1995) Science 270:397 and Methanococcus jannashii (Bult et al. (1996) Science 273:1058). All of these microbes have relatively small genomes of 1.8, 0.6, and 1.8 megabases, respectively. The size of the M. catarrhalis genome is estimated to be 1.9 megabases.

### Example 2

### Construction of the Genomic Library

[0105] An M. catarrhalis genomic DNA library was constructed using DNA purified from the gram negative, aerobic diplococcus, M. catarrhalis, ATCC accession number 43617. The isolate was obtained from transtracheal aspirate of a coal miner with chronic bronchitis. The G+C content is 42%.

[0106] Using a syringe fitted with a 0.0025 in. Ruby orifice (Stanford University, Stanford Calif.), 50 μg of M. catarrhalis DNA was sheared into 1.5-2.9 kb fragments. The shearing process was monitored by electrophoresis of a subsample of sheared DNA on a 0.8% SEAKEM GTG agarose gel (FMC Bioproducts, Rockland Me.) in 1×TAE buffer at about 950 V-h. Comparison with a DNA ladder with known size fragments was used to verify the size and quality of the sheared DNA

[0107] Sheared DNA was visualized with low wavelength UV and bands of 1.5 to 2.8 kbs were removed from a preparative 0.8% SEAKEM GTG agarose gel (FMC Bioproducts). The 1.5-2.9 kb fragments were electrophoresced through a preparative 0.8% SEAPLAQUE GTG low melt agarose gel (FMC Bioproducts) in 1×TAE buffer at about 850 V-h. The DNA band was removed from the low melt agarose, placed in an microcentrifuge tube, and the agarose melted at 65 C for 10-15 minutes. After 5 minutes of heating, the melted agarose was diluted with a half volume of double distilled water, and the sample was equilibrated to 42 C. β-AGARASE (New England Biolabs (NEB), Beverly Mass.) and 10xβ-AGARASE (NEB) were added, and the preparation was incubated for 1-3 hours with addition of a half initial volume of β-AGARASE (NEB) after 1 hour and mixing by inversion every half hour. The DNA was extracted once with phenol:chloroform:isoamyl alcohol (25:24:1) followed by extraction with chloroform:isoamyl alcohol (24:1) and precipitated by addition of 1-3 μl glycogen, 1/10 volume 3M NaOAc, and 2.5 volumes cold 100% ethanol. The sample was stored overnight at −20 C.

[0108] The purified DNA strands were treated with BAL31 (NEB) at 1 U/20 μg DNA in a final volume of 50 μl at 30 C for 10 minutes to prepare blunt ends. Then the DNA was re-extracted as above (phenol:chloroform:isoamyl alcohol followed by chloroform:isoamyl alcohol). The DNA was reprecipitated as above and stored at −20 C until ligation into the vector.

[0109] The PBLUESCRIPT plasmid (Stratagene) was cut with SmaI endonuclease, and the ends of the strands dephosphorylated to prepare the BS.S2 vector. The purified M. catarrhalis DNA (2 μg) was ligated into the BS.S2 vector (1 μg) with T4 DNA ligase (Life Technologies) for 4 hours at 14 C. Following the ligation reaction, the ligated DNA was extracted and precipitated as above. The ligated vector:insert DNA was the size selected (vector+insert=4.4-5.7 kb) and purified by gel electrophoresis and extracted as described above.

[0110] Following gel purification, the ends of the vector:insert DNA were repaired using T4 DNA polymerase (NEB) for 5 minutes at 37 C, re-extracted and precipitated as above, and self-ligated into circles with T4 DNA ligase (Life Technologies). After 10 minutes, the ligation reaction was stopped by heating at 70 C for 10 minutes.

[0111] The circular plasmid was transformed into DH10B competent cells (Life Technologies) by electroporation at 1.8 volts. Transformed cells were selected by growth on X-Gal+isopropyl beta-D-thiogalactopyranoside (IPTG)+2× carbenicillin (carb) LB agar plates.

### Example 3

### Isolation of Clones and Sequencing

[0112] Plasmid DNA was released from the cells and purified using the REAL PREP 96 plasmid kit (QIAGEN, Chatsworth Calif.). This kit enabled simultaneous purification of 96 samples in a 96-well block using multi-channel reagent dispensers. The recommended protocol was employed except for the following changes: 1) the bacteria were cultured in 1 ml of sterile TERRIFIC BROTH (BD Biosciences, Sparks Md.) with carb at 25 mg/l and glycerol at 0.4%; 2) after inoculation and incubation for 19 hours, the cells were lysed with 0.3 ml of lysis buffer; and 3) following isopropanol precipitation, the plasmid DNA pellet was resuspended in 0.1 ml of distilled water. After this final step, samples were transferred to a 96-well block for storage at 4 C.

[0113] The DNA inserts were prepared for sequencing using a 96 well HYDRA microdispenser (Robbins Scientific) in combination with DNA ENGINE thermal cyclers (MJ Research). After thermal cycling, the A, C, G, and T reactions with each DNA template were combined. Then, 50 μl 100% ethanol was added, and the solution was spun at 4 C for 30 min at 4500 rpm in a centrifuge (Jouan, Winchester Va.). After the pellet was dried for 15 min under vacuum, the DNA sample was dissolved in 3 μl of formaldehyde/50 mM EDTA and loaded on wells in volumes of 1 μl per well for sequencing. Sequencing used the method of Sanger and Coulson (1975, J. Mol. Biol. 94:441f) and an ABI PRISM 377 sequencing systems (PE Biosystems). After electrophoresis for four hours on 4% acrylamide gels on 36 cm plates at 2.3 kV, approximately 500-650 bps were determined per sequence.

### Example 4

### Sequence Processing and Contiguous Sequence Assembly

[0114] Sequences were generated from either shotgun sequencing or closure sequencing. Closure sequences were obtained by directed genomic walks or PCR of specific genomic regions. In the latter case, the PCR products were sequenced.

[0115] Sequences were edited in a two-step process. In the first step, vector sequences from both the 5′ and 3′ ends were clipped using the algorithm provided in U.S. Ser. No. 09/276,534 filed Mar. 25, 1999. In the second step, possible contaminating sequence was removed by reading each raw sequence and performing a cross-match search against a contamination database containing known vector sequences and DNA marker sequences. Sequences with cross-match scores of 18 or greater were removed.

[0116] Contigs were assembled using PHRAP (Green, supra) which aligns multiple, overlapping DNA sequences to form a contiguous consensus sequence. Alignments were influenced by quality scores assigned to each base in a sequence. A single sequence cannot belong to more than one contig.

[0117] The 41 contigs presented in Table 1 and the Sequence Listing were assembled from 47385 individual sequences. The contigs represent approximately 13.3× coverage or 100.7% of the M. catarrhalis genome.

### Example 5

### Gene Finding

[0118] ORF identification was carried out through combination of BLAST (Karlin, supra) and FASTA searches. These serial searches compared the consensus sequences of the assembled contigs, presented in Table 1, against sequences in public-domain databases. The searches identified similarity matches, or “hits”, that indicated an ORF within the sequence.

[0119] The consensus sequences of the contigs were analyzed against the GenBank peptide (GenPept) database. The ORF identification process assigned ORFs to loci on a contig. If a match was found at a P-value less than or equal to 1e-6, the corresponding locus on the contig was designated as an ORF. This portion of the contig was masked by Ns, and the consensus sequence underwent a second BLASTX or FASTX search against the GenPept database. Again, the match with the lowest P-value (less than or equal to 1e-6) was used to identify a second ORF. The corresponding sequences were masked, and the process continued until all BLASTX and FASTX matches with P-values less than or equal to le-6 had been identified for a given contig. Then, the contigs were run through GeneMark, an algorithm for identifying putative ORFs. The GeneMark algorithm is described and developed in the following references: Borodovsky and McIninch (1993) Computers & Chemistry 17:123; Blattner et al. (1993) Nucl Acid Res 21:5408; and Borodovsky et al. (1994) Trends Biochem Sci 19:309. After all possible homology and algorithm-based ORFs were identified, a process called ORF selection was applied. In this process GeneMark ORFs that overlapped homology-based ORFs were rejected, and homology-based ORFs were retained. GeneMark ORFs that did not overlap homology-based ORFs and those that overlapped other GeneMark ORFs were retained. Finally, all ORFs were annotated by performing BLAST2 comparisons against GenPept and taking annotation from the best hit with P-value less than or equal to 1e-6.

[0120] Contigs with high probability for ORFs, but no identified ORFs, were identified as “orphan” contigs (Table 1). Unannotated regions of contigs exceeding 500 bases in length were identified as “Long-Unannotated Regions” (LURs) and contain novel ORFs. The designations, orphan and LUR, were based on comparative analyses of the lengths of ORFs and unannotated regions.

[0121] A total of 1258 ORFs were identified by homology searches of the GenPept database with an additional 253 ORFs identified using the GeneMark algorithm.

### Example 6

### Gene Clustering

[0122] In the final step of analysis, a gene clustering protocol is used to determine related ORFs within and across genomes. Gene clustering is carried out through BLAST2 pairwise comparisons of each ORF in the PATHOSEQ database (Incyte Genomics, Palo Alto Calif.) against every other ORF in the database. If two ORFs matched each other at a P-value less than or equal to 1e-15, they were placed in the same cluster. If a third ORF matched either of the first two ORFs at a P-value of less than or equal to 1e-15, the third ORF joined the cluster. Thus, clusters were formed so that any ORF in a cluster must match at least one other ORF in the cluster at less than or equal to the threshold P-value of 1e-15. The representative ORF for a cluster is the one with the best matched annotation.

### Example 7

### Ordering of Contiguous Sequences

[0123] The ordering of contigs has been accomplished through three types of analyses: 1) 5′/3′ sequence pair information, 2) annotation information, and 3) BLAST2 analysis of the ends of contigs. Contig ordering based on 5′/3′ sequence pairs was done by identifying all 5′/3′ sequence pairs (5′ and 3′ sequences with the same Sequence ID) that were not in the same contig, but span a gap between two contigs with the estimated distance between them of about 1.5-3.0 kb (the insert size of the library). Annotation information was used to determine contig order in two ways, either by identifying genes spanning contig gaps or by comparison with genes at the ends of contigs in related organisms with similar gene order.

[0124] Genes spanning gaps were identified by observing the N-terminal portion of an ORF at the end of one contig and the C-terminal portion of an ORF at the end of another contig. Two partial ORFs are considered to be portions of the same ORF when they meet this criteria and annotate to the same top five GenPept database entries. Comparison of two related organisms with similar gene order is used to predict contig ordering when one organism contains continuous gene order information over a region that spans a gap in the second organism. BLAST analysis of the ends of contigs was used to identify those contigs which overlapped, but failed to join because the sequence overlap did not meet the length or quality score required by PHRAP (Green, supra). Table 2 shows the ordering of the M. catarrhalis contigs as supported by one or more of these analyses.

### Example 8

### Extension of Partial ORFs to Full Length

[0125] Using the DNA sequences disclosed herein, an ORF is extended using a modified XL-PCR (PE Biosystems) procedure. Oligonucleotide primers, one to initiate 5′ extension and the other to initiate 3′ extension were designed using the nucleotide sequence of the known fragment and OLIGO 4.06 software (National Biosciences). The initial primers were about 22 to 30 nucleotides in length, had a GC content of about 42%, and annealed to the target sequence at temperatures of about 55 C to about 68 C. Any fragment which would result in hairpin structures and primer-primer dimerizations was avoided. The genomic DNA library was used to extend the molecule. If more than one extension was needed, additional or nested sets of primers were designed.

[0126] High fidelity amplification was obtained by performing PCR in 96-well plates using the DNA ENGINE thermal cycler (MJ Research). The reaction mix contained 2+DNA template, 200 mol of each primer, reaction buffer containing Mg, (NH₄)₂SO₄, and β-mercaptoethanol, Taq DNA polymerase (APB), ELONGASE enzyme (Life Technologies), and Pfu DNA polymerase (Stratagene), with the following parameters for primer pair selected from the plasmid: Step 1: 94 C, 3 min; Step 2: 94 C, 15 sec; Step 3: 60 C, 1 min; Step 4: 68 C, 2 min; Step 5: Steps 2, 3, and 4 repeated 20 times; Step 6: 68 C, 5 min; Step 7: storage at 4 C. In the alternative, parameters for the primer pair, T7 and SK+ (Stratagene), were as follows: Step 1: 94 C, 3 min; Step 2: 94 C, 15 sec; Step 3: 57 C, 1 min; Step 4: 68 C, 2 min; Step 5: Steps 2, 3, and 4 repeated 20 times; Step 6: 68 C, 5 min; Step 7: storage at 4 C.

[0127] The concentration of DNA in each well was determined by dispensing 100 μl PICOGREEN quantitation reagent (0.25% v/v; Molecular Probes) dissolved in 1×TE and 0.5 μl of undiluted PCR product into each well of an opaque fluorimeter plate (Corning Costar, Acton Mass.) and allowing the DNA to bind to the reagent. The plate was scanned in a Fluoroskan II (Labsystems Oy, Helsinki, Finland) to measure the fluorescence of the sample and to quantify the concentration of DNA. A 5 μl to 10 μl aliquot of the reaction mixture was analyzed by electrophoresis on a 1% agarose mini-gel to determine which reactions were successful in producing longer sequence.

[0128] The extended sequences were desalted, concentrated, transferred to 384-well plates, digested with CviJI cholera virus endonuclease (Molecular Biology Research, Madison Wis.), and sonicated or sheared prior to religation into pUC18 vector (APB). For shotgun sequencing, the digested fragments were separated on about 0.6-0.8% agarose gels, fragments were excised as visualized under UV light, and agarose removed/digested with AGARACE enzyme (promega). Extended fragments were religated using T4 DNA ligase (NEB) into pUC18 vector (APB), treated with Pfu DNA polymerase (Stratagene) to fill-in restriction site overhangs, and transformed into competent E. coli cells. Transformed cells were selected on antibiotic-containing media, and individual colonies were picked and cultured overnight at 37 C in 384-well plates in LB/2×carb liquid media.

[0129] The cells were lysed, and DNA was amplified using Taq DNA polymerase (APB) and Pfu DNA polymerase (Stratagene) with the following parameters: Step 1: 94 C, 3 min; Step 2: 94 C, 15 sec; Step 3: 60 C, 1 min; Step 4: 72 C, 2 min; Step 5: steps 2, 3, and 4 repeated 29 times; Step 6: 72 C, 5 min; Step 7: storage at 4 C. DNA was quantified by PICOGREEN reagent (Molecular Probes) as described above. Samples with low DNA recoveries were reamplified using the conditions described above. Samples were diluted with 20% dimethysulphoxide (1:2, v/v), and sequenced using DYENAMIC energy transfer sequencing primers and the DYENAMIC DIRECT kit (APB) or the ABI PRISM BIGDYE terminator kit (PE Biosystems).

### Example 9

### Labeling of Probes and Hybridization Analyses

[0130] Substrate Preparation

[0131] Nucleic acids are isolated from a biological source and applied to a substrate for standard hybridization protocols by one of the following methods. A mixture of nucleic acids, a restriction digest of genomic DNA, is fractionated by electrophoresis through an 0.7% agarose gel in 1×TAE running buffer and transferred to a nylon membrane by capillary transfer using 20× saline sodium citrate (SSC). Alternatively, the nucleic acids are individually ligated to a vector and inserted into bacterial host cells to form a library. Nucleic acids are arranged on a substrate by one of the following methods. In the first method, bacterial cells containing individual clones are robotically picked and arranged on a nylon membrane. The membrane is placed on bacterial growth medium. LB agar containing carb, and incubated at 37 C for 16 hours. Bacterial colonies are denatured, neutralized, and digested with proteinase K. Nylon membranes are exposed to UV irradiation in a STRATALINKER UV-crosslinker (Stratagene) to cross-link DNA to the membrane.

[0132] In the second method, nucleic acids are amplified from bacterial vectors by thirty cycles of PCR using primers complementary to vector sequences flanking the insert. Amplified nucleic acids are purified using SEPHACRYL-400 beads (APB). Purified nucleic acids are robotically arrayed onto a glass microscope slide (Corning Science Products, Corning N.Y.). The slide is previously coated with 0.05% aminopropyl silane (Sigma-Aldrich, St. Louis Mo.) and cured at 110 C. The arrayed glass slide (microarray) is exposed to UV irradiation in a STRATALINKER UV-crosslinker (Stratagene).

[0133] Probe Preparation

[0134] DNA probes are made from mRNA templates. Five micrograms of mRNA is mixed with 1 μg random primer (Life Technologies), incubated at 70 C for 10 minutes, and lyophilized. The lyophilized sample is resuspended in 50 μl of 1× first strand buffer (cDNA Synthesis systems; Life Technologies) containing a dNTP mix, [α-³²P]dCTP, dithiothreitol, and MMLV reverse transcriptase (Stratagene), and incubated at 42 C for 1-2 hours. After incubation, the probe is diluted with 42 μl dH₂O, heated to 95 C for 3 minutes, and cooled on ice. mRNA in the probe is removed by alkaline degradation. The probe is neutralized, and degraded mRNA and unincorporated nucleotides are removed using a PROBEQUANT G-50 column (APB). Probes are labeled with fluorescent markers, Cy3-dCTP or Cy5-dCTP (APB), in place of the radionucleotide, [³²P]dCTP.

[0135] Hybridization

[0136] Hybridization is carried out at 65 C in a hybridization buffer containing 0.5 M sodium phosphate (PH 7.2), 7% SDS, and 1 mM EDTA After the substrate is incubated in hybridization buffer at 65 C for at least 2 hours, the buffer is replaced with 10 ml of fresh buffer containing the probes. After incubation at 65 C for 18 hours, the hybridization buffer is removed, and the substrate is washed sequentially under increasingly stringent conditions, up to 40 mM sodium phosphate, 1% SDS, 1 mM EDTA at 65 C. To detect sighal produced by a radiolabeled probe hybridized on a membrane, the substrate is exposed to a PHOSPHORIMAGER cassette (APB), and the image is analyzed using IMAGEQUANT data analysis software (APB). To detect signals produced by a fluorescent probe hybridized on a microarray, the substrate is examined by confocal laser microscopy, and images are collected and analyzed using GEMTOOLS gene expression analysis software (Incyte Genomics).

### Example 10

### Complementary Nucleic Acid Molecules

[0137] Molecules complementary to the nucleic acid molecule, or a fragment thereof, are used to detect, decrease, or inhibit gene expression. Although use of oligonucleotides comprising from about 15 to about 30 base pairs is described, the same procedure is used with larger or smaller fragments or derivatives such as peptide nucleic acids (PNAs). Oligonucleotides are designed using OLIGO 4.06 software (National Biosciences) and a nucleic acid molecule of the Sequence Listing or fragment thereof. To inhibit transcription by preventing promoter binding, a complementary oligonucleotide is designed to bind to sequence 5′ of the ORF, most preferably about 10 nucleotides before the initiation codon of the ORF. To inhibit translation, a complementary oligonucleotide is designed to prevent ribosomal binding to the mRNA encoding the M. catarrhalis protein.

### Example 11

### Expression of an M. catarrhalis Protein

[0138] An M. catarrhalis nucleic acid molecule is subcloned into a vector containing an antibiotic resistance gene and the inducible T5 or T7 bacteriophage promoter in conjunction with the lac operator regulatory element. Recombinant vectors are transformed into BL21(DE3) competent cells (Stratagene). Antibiotic resistant bacteria express the bacterial protein upon induction with IPTG.

[0139] The protein is synthesized as a fusion protein with FLAG which permits affinity-based purification of the recombinant fusion protein from crude cell lysates. Kits for immunoaffinity purification using monoclonal and polyclonal anti-FLAG antibodies (Eastman Kodak, Rochester N.Y.) are commercially available. Following purification the heterogeneous moiety is proteolytically cleaved from the bacterial protein at specifically engineered sites. Purified protein is used directly in the production of antibodies or in activity assays.

### Example 12

### Production of M. catarrhalis Protein Specific Antibodies

[0140] An M. catarrhalis produced as described above or an oligopeptide designed and synthesized using an ABI 431 A peptide synthesizer (pE Biosystems) is used to produce an antibody. Animals are immunized with the protein or an oliopeptide-KLH complex in complete Freund's adjuvant. Immunizations are repeated at intervals thereafter in incomplete Freund's adjuvant. After a minimum of seven weeks for mouse or twelve weeks for rabbit, antisera are drawn and tested for antipeptide activity. Testing involves binding the peptide to plastic, blocking with 1% bovine serum albumin, reacting with rabbit antisera, washing, and reacting with radio-iodinated goat anti-rabbit IgG. Methods and machinery well known in the art are used to determine antibody titer and the amount of complex formation.

### Example 13

### Screening or Purifying Molecules Using Specific Binding

[0141] The nucleic acid molecule, or fragments thereof, or the protein, or portions thereof, are labeled with ³²P-dCTP, Cy3-dCTP, Cy5-dCTP (APB), or BIODIPY or FITC (Molecular Probes), respectively. Libraries of candidate molecules previously arranged on a substrate are incubated in the presence of labeled nucleic acid molecule or protein. After incubation under conditions for either a nucleic acid or amino acid sequence, the substrate is washed, and any position on the substrate retaining label, which indicates specific binding or complex formation, is assayed, and the binding molecule is identified. Data obtained using different concentrations of the nucleic acid or protein are used to calculate affinity between the labeled nucleic acid or protein and the bound molecule.

### Example 14

### Identification of M. catarrhalis Genes Induced During Infection

[0142] In vivo expression technology (IVET) is used with the sequences, or ORFs, to identify M. catarrhalis genes specifically induced during infection or under pathogenic conditions (Mahan et al. (1993) Science 259:686). A library of random genomic fragments of M. catarrhalis is made and ligated to a gene for a selectable marker required for survival in the host animal. Only those M. catarrhalis cells harboring a fusion sequence containing an active promoter will survive passage through the host. Fusion bearing promoters with constitutive activity are identified and discarded by examining reporter activity on laboratory medium passaged M. catarrhalis bacteria. By harvesting M. catarrhalis cells from infection sites in the host and subtraction of the identified constitutively activated genes, a list of genes turned on during infection or under pathogenic conditions are compiled.

[0143] Host induced M. catarrhalis genes are identified using the M. catarrhalis sequences and ORFs disclosed herein and the method of differential fluorescence induction described by Valdivia and Falkow, (1996; Mol Microbiol 22:367).

### Example 15

### Identification of M. catarrhalis Genes Required for Survival in Host

[0144] Using the M. catarrhalis genomic sequences and ORFs, genes required for survival in a host is determined using the signature-tagged transposon method described by Hensel et al. (1995; Science 269:400). A library of M. catarrhalis mutants is marked with a unique oligonucleotide sequence for each disrupted gene. After passage of the library though an infected animal or other selective environment, putative survival genes are identified by absence of the mutant from the passaged library.

[0145] Various modifications of the described method and system of the invention will be apparent to those skilled in the art without departing from the scope and spirit of the invention. Although the invention has been described as specific preferred embodiments, it should be understood that the invention as claimed should not be unduly limited to such specific embodiments. Indeed, various modifications of the above-described modes for carrying out the invention which are obvious to those skilled in the field of molecular biology or related fields are intended to be within the scope of the following claims.

TABLE 1

| Contig | Size | Start | End | Locus ID | Identifier | P-value | Description |
|---|---|---|---|---|---|---|---|
| 1 | 429 | 4 | 264 | MCA101123 | g2634865 | 5.00E−18 | methylenetetrahydrofolate |
| | | | | | | | dehydrogenase |
| 5 | 4258 | 4030 | 4257 | MCA100094 | g145409 | 4.00E−17 | bacterioferritin |
| 5 | 4258 | 1264 | 2612 | MCA100203 | g3402236 | e−127 | L-serine dehydratase |
| 5 | 4258 | 3523 | 3978 | MCA100205 | g1673579 | 2.00E−51 | bacterioferritin |
| 5 | 4258 | 2 | 343 | MCA101132 | g1001512 | 3.00E−24 | methylenetetrahydrofolate |
| | | | | | | | dehydrogenase |
| 6 | 5009 | 41 | 1448 | MCA100317 | g1519052 | e−134 | succinyl CoA: 3-oxoacid |
| | | | | | | | CoA transferase |
| | | | | | | | precursor |
| 6 | 5009 | 1777 | 4587 | MCA100318 | g1574147 | 0 | transferrin-binding |
| | | | | | | | protein, putative |
| 6 | 5009 | 4729 | 5007 | MCA101039 | g1786625 | 6.00E−13 | putative |
| | | | | | | | oxidoreductase |
| 7 | 6703 | 2960 | 3466 | MCA100395 | g3861150 | 6.00E−23 | probable 50S ribosomal |
| | | | | | | | protein L25 (rply) |
| 7 | 6703 | 965 | 2437 | MCA100550 | g2465556 | e−155 | OpuE |
| 7 | 6703 | 3687 | 4250 | MCA100554 | g1573366 | 6.00E−44 | peptidyl-tRNA |
| | | | | | | | hydrolase (pth) |
| 7 | 6703 | 4491 | 5846 | MCA100555 | g1220106 | e−120 | hemN |
| 7 | 6703 | 351 | 563 | MCA101455 | g2731760 | 1.00E−13 | 30S subunit ribosomal |
| | | | | | | | protein S21 |
| 8 | 7424 | 2423 | 3103 | MCA100638 | g286176 | 4.00E−33 | negative regulator of |
| | | | | | | | pyocin genes |
| 8 | 7424 | 5081 | 6058 | MCA101449 | g48773 | 3.00E−97 | methyltransferase |
| 8 | 7424 | 3218 | 4327 | MCA101610 | | | |
| 8 | 7424 | 4320 | 5060 | MCA101612 | | | |
| 8 | 7424 | 6504 | 6665 | MCA101982 | | | |
| 8 | 7424 | 6662 | 6928 | MCA101983 | | | |
| 8 | 7424 | 6925 | 7320 | MCA101984 | g1742219 | 1.00E−08 | Exodeoxyribonuclease |
| | | | | | | | VIII (EC 3.1.11.—) |
| | | | | | | | (Exo VIII). |
| 9 | 10709 | 465 | 1976 | MCA100745 | g347071 | e−141 | 4-hydroxybutyrate |
| | | | | | | | coenzyme A transferase |
| 9 | 10709 | 2306 | 3046 | MCA100746 | g3063885 | 5.00E−30 | putative acyl-coA |
| | | | | | | | dehydrogenase |
| 9 | 10709 | 4192 | 5478 | MCA100748 | g1923241 | 4.00E−69 | site-specific |
| | | | | | | | recombinase |
| 9 | 10709 | 5983 | 7809 | MCA100749 | g216913 | 0 | principal sigma |
| | | | | | | | factor, rpoDA |
| 9 | 10709 | 8288 | 8701 | MCA100750 | | | |
| 9 | 10709 | 8698 | 9393 | MCA100751 | g1574756 | 3.00E−12 | conserved hypothetical |
| | | | | | | | transmembrane protein |
| 9 | 10709 | 3 | 200 | MCA101334 | g154276 | 3.00E−22 | peptide chain release |
| | | | | | | | factor 2 |
| 9 | 10709 | 9866 | 10330 | MCA101713 | g3025510 | 2.00E−33 | putative |
| | | | | | | | transglycosylase |
| 10 | 19988 | 12800 | 12973 | MCA100043 | g2281030 | 1.00E−22 | ZfiA protein |
| 10 | 19988 | 13066 | 13413 | MCA100044 | | | |
| 10 | 19988 | 966 | 2060 | MCA100336 | g4062697 | e−121 | Hypothetical protein |
| | | | | | | | in purB 5′region (orf- |
| | | | | | | | 15) |
| 10 | 19988 | 2141 | 3409 | MCA100338 | g2633742 | 4.00E−18 | similar to |
| | | | | | | | hypothetical proteins |
| | | | | | | | from B. subtilis |
| 10 | 19988 | 15744 | 16295 | MCA100456 | g1805560 | 3.00E−36 | phosphoribosylglycinamide |
| | | | | | | | formyltransferase |
| | | | | | | | (EC 2.1.2.2) |
| 10 | 19988 | 16331 | 17356 | MCA100457 | g1788845 | e−130 | phosphoribosylaminoimi |
| | | | | | | | dazole synthetase = AIR |
| | | | | | | | synthetase |
| 10 | 19988 | 17685 | 18677 | MCA100458 | g3861171 | 2.00E−27 | putative permease |
| | | | | | | | homolog (perM) |
| 10 | 19988 | 18921 | 19685 | MCA100459 | g3212215 | 2.00E−11 | conserved hypothetical |
| | | | | | | | protein |
| 10 | 19988 | 5532 | 8192 | MCA100516 | g1800083 | 0 | Alanyl-tRNA Synthetase |
| | | | | | | | (EC 6.1.1.7) |
| 10 | 19988 | 8821 | 10335 | MCA100518 | g2632668 | 3.00E−69 | similar to di- |
| | | | | | | | tripeptide ABC |
| | | | | | | | transporter |
| 10 | 19988 | 3517 | 4892 | MCA100711 | g1573637 | e−171 | adenylosuccinate lyase |
| | | | | | | | (purB) |
| 10 | 19988 | 11303 | 12571 | MCA100888 | g2983613 | e−106 | aspartokinase |
| 10 | 19988 | 13673 | 13906 | MCA101216 | g1573976 | 4.00E−31 | ribosomal protein L28 |
| | | | | | | | (rpL28) |
| 10 | 19988 | 13949 | 14101 | MCA101228 | g1790067 | 7.00E−18 | 50S ribosomal subunit |
| | | | | | | | protein L33 |
| 10 | 19988 | 14201 | 14950 | MCA101234 | g3342798 | 1.00E−29 | glutamine |
| | | | | | | | cyclotransferase |
| | | | | | | | precursor |
| 10 | 19988 | 8330 | 8503 | MCA101481 | | | |
| 10 | 19988 | 334 | 801 | MCA101636 | g1789103 | 9.00E−38 | orf, hypothetical |
| | | | | | | | protein |
| 11 | 14335 | 4618 | 5967 | MCA100986 | g1572963 | e−155 | conserved hypothetical |
| | | | | | | | protein |
| 11 | 14335 | 7881 | 8108 | MCA100989 | | | |
| 11 | 14335 | 8089 | 8514 | MCA100990 | | | |
| 11 | 14335 | 8504 | 9154 | MCA100991 | g455332 | 2.00E−07 | pilus expression |
| | | | | | | | protein |
| 11 | 14335 | 9281 | 10588 | MCA100992 | g459551 | 1.00E−73 | fimbrial assembly |
| | | | | | | | protein |
| 11 | 14335 | 10856 | 11347 | MCA100993 | g1573166 | 3.00E−44 | shikimic acid kinase I |
| | | | | | | | (aroK) |
| 11 | 14335 | 11422 | 12447 | MCA100994 | g2661441 | 6.00E−88 | 3-dehydroquinate |
| | | | | | | | synthetase |
| 11 | 14335 | 12538 | 13482 | MCA100995 | | | |
| 11 | 14335 | 13503 | 14108 | MCA100996 | g2950411 | 5.00E−26 | hypothetical protein |
| | | | | | | | Rv3588c |
| 11 | 14335 | 1110 | 2087 | MCA101460 | g4235484 | e−142 | malate dehydrogenase |
| 11 | 14335 | 2383 | 3599 | MCA101547 | g1790853 | 2.00E−25 | soluble lytic murein |
| | | | | | | | transglycosylase |
| 11 | 14335 | 7292 | 7798 | MCA101551 | g455330 | 4.00E−15 | membrane protein |
| 11 | 14335 | 14167 | 14335 | MCA101992 | | | |
| 12 | 21410 | 15 | 647 | MCA100476 | g2462048 | 9.00E−50 | monofunctional |
| | | | | | | | peptidoglycan |
| | | | | | | | transglycosylase |
| 12 | 21410 | 993 | 3011 | MCA100477 | g2462047 | 0 | polyphosphate kinase |
| 12 | 21410 | 3051 | 3521 | MCA100478 | g1573243 | 1.00E−34 | conserved hypothetical |
| | | | | | | | protein |
| 12 | 21410 | 3641 | 4690 | MCA100479 | g1573154 | e−142 | chorismate synthase |
| | | | | | | | (aroC) |
| 12 | 21410 | 5549 | 6016 | MCA100481 | g1786848 | 6.00E−38 | protein of lipoate |
| | | | | | | | biosynthesis |
| 12 | 21410 | 6421 | 7621 | MCA100938 | g1787162 | 9.00E−88 | nicotinate |
| | | | | | | | phosphoribosyltransferase |
| 12 | 21410 | 8297 | 9625 | MCA100940 | g1573601 | e−123 | conserved hypothetical |
| | | | | | | | protein |
| 12 | 21410 | 9759 | 10676 | MCA100941 | g149244 | 3.00E−59 | Lys R member |
| 12 | 21410 | 10956 | 12413 | MCA100942 | g4456996 | 5.00E−90 | permease for AmpC |
| | | | | | | | beta-lactamase |
| | | | | | | | expression AmpG |
| 12 | 21410 | 12579 | 13343 | MCA100943 | g1651602 | 3.00E−41 | Protoporphyrinogen |
| | | | | | | | oxidase (EC 1.3.3.4) |
| | | | | | | | hemK |
| 12 | 21410 | 13406 | 14134 | MCA100944 | g1787048 | 1.00E−40 | molybdopterin |
| | | | | | | | biosynthesis |
| 12 | 21410 | 14383 | 15528 | MCA100945 | g3261724 | 2.00E−42 | hypothetical protein |
| | | | | | | | Rv0647c |
| 12 | 21410 | 17885 | 18445 | MCA100947 | g41336 | 9.00E−49 | enterohemolysin 1 |
| 12 | 21410 | 4870 | 5397 | MCA101603 | g1573079 | 2.00E−71 | inorganic |
| | | | | | | | pyrophosphatase (ppa) |
| 13 | 31940 | 29883 | 30041 | MCA100005 | g3282800 | 2.00E−09 | 50S ribosomal protein |
| | | | | | | | L32 |
| 13 | 31940 | 17948 | 18358 | MCA100019 | g42833 | 2.00E−46 | ribosomal protein L16 |
| | | | | | | | (rplP) (aa 1-136) |
| 13 | 31940 | 20208 | 20510 | MCA100105 | g1789703 | 3.00E−29 | 30S ribosomal subunit |
| | | | | | | | protein S14 |
| 13 | 31940 | 22493 | 22663 | MCA100139 | g498362 | 1.00E−16 | ribosomal protein L30 |
| 13 | 31940 | 22675 | 23106 | MCA100140 | g1573807 | 8.00E−37 | ribosomal protein L15 |
| | | | | | | | (rpL15) |
| 13 | 31940 | 23182 | 24408 | MCA100141 | g606234 | e−111 | secY |
| 13 | 31940 | 18936 | 19301 | MCA100153 | g606244 | 1.00E−53 | 50S ribosomal subunit |
| | | | | | | | protein L14 |
| 13 | 31940 | 19325 | 19627 | MCA100154 | g1573799 | 3.00E−24 | ribosomal protein L24 |
| | | | | | | | (rpL24) |
| 13 | 31940 | 19660 | 20193 | MCA100155 | g1573800 | 2.00E−71 | ribosomal protein L5 |
| | | | | | | | (rpL5) |
| 13 | 31940 | 20528 | 20923 | MCA100157 | g1573802 | 1.00E−41 | ribosomal protein S8 |
| | | | | | | | (rpS8) |
| 13 | 31940 | 21077 | 21607 | MCA100158 | g710620 | 7.00E−58 | ribosomal protein L6 |
| 13 | 31940 | 21628 | 21969 | MCA100159 | g1573804 | 1.00E−32 | ribosomal protein L18 |
| | | | | | | | (rpL18) |
| 13 | 31940 | 21975 | 22469 | MCA100160 | g42986 | 8.00E−54 | S5 (rpSE) (aa 1-167) |
| 13 | 31940 | 14176 | 14808 | MCA100248 | g1573787 | 4.00E−78 | ribosomal protein L3 |
| | | | | | | | (rpL3) |
| 13 | 31940 | 14853 | 15425 | MCA100249 | g1037107 | 3.00E−70 | L4 |
| 13 | 31940 | 15437 | 15724 | MCA100250 | g510688 | 7.00E−17 | ribosomal protein L23 |
| 13 | 31940 | 15765 | 16586 | MCA100251 | g48648 | e−121 | ribosomal protein L2 |
| | | | | | | | (AA 1-274) |
| 13 | 31940 | 16605 | 16877 | MCA100252 | g1841326 | 1.00E−37 | ribosomal protein S19 |
| 13 | 31940 | 16890 | 17216 | MCA100253 | g42831 | 1.00E−35 | ribosomal protein L22 |
| | | | | | | | (rplV) (aa 1-110) |
| 13 | 31940 | 17222 | 17926 | MCA100254 | g42832 | 2.00E−78 | ribosomal protein S3 |
| | | | | | | | (rpsC) (aa 1-233) |
| 13 | 31940 | 11780 | 13402 | MCA100255 | g48826 | e−113 | orfF |
| 13 | 31940 | 10997 | 11554 | MCA100256 | g606188 | 1.00E−24 | ORF_f217; orfE of |
| | | | | | | | ECMRED, uses 2nd start |
| 13 | 31940 | 10381 | 10659 | MCA100257 | g2589194 | 1.00E−08 | Glu-tRNAGln |
| | | | | | | | amidotransferase |
| | | | | | | | subunit C |
| 13 | 31940 | 8809 | 10284 | MCA100258 | g1224069 | 0 | amidase |
| 13 | 31940 | 7813 | 8754 | MCA100259 | g1403365 | 0 | BRO-2 |
| 13 | 31940 | 3925 | 4569 | MCA100414 | g3493603 | 5.00E−26 | outer membrane protein |
| | | | | | | | homolog |
| 13 | 31940 | 24691 | 25044 | MCA100423 | g581217 | 6.00E−46 | ribosomal protein S13 |
| | | | | | | | (aa 1-118) |
| 13 | 31940 | 25068 | 25457 | MCA100424 | g4098575 | 7.00E−48 | ribosomal protein S11 |
| 13 | 31940 | 25473 | 26111 | MCA100425 | g42798 | 4.00E−72 | ribosomal protein S4 |
| | | | | | | | (aa 1-206) |
| 13 | 31940 | 26142 | 27107 | MCA100426 | g2896137 | e−112 | DNA-directed RNA |
| | | | | | | | polymerase alpha chain |
| 13 | 31940 | 27162 | 27518 | MCA100427 | g2896138 | 3.00E−52 | ribosomal large |
| | | | | | | | subunit protein L17 |
| 13 | 31940 | 29100 | 29645 | MCA100430 | | | |
| 13 | 31940 | 18361 | 18540 | MCA100557 | g1841330 | 9.00E−09 | ribosomal protein L29 |
| 13 | 31940 | 7570 | 7746 | MCA100583 | g2589196 | 2.00E−15 | Glu-tRNAGln |
| | | | | | | | amidotransferase |
| | | | | | | | subunit B |
| 13 | 31940 | 6307 | 7563 | MCA100584 | g1224071 | 0 | unknown |
| 13 | 31940 | 2606 | 3502 | MCA100588 | g304968 | 3.00E−45 | ORF_f310 |
| 13 | 31940 | 30365 | 31270 | MCA100612 | g3282803 | 2.00E−64 | malonyl CoA-acyl |
| | | | | | | | carrier protein |
| | | | | | | | transacylase |
| 13 | 31940 | 1 | 282 | MCA101350 | g1651578 | 2.00E−26 | Cell division |
| | | | | | | | inhibitor MinD. |
| 13 | 31940 | 488 | 748 | MCA101742 | g1651579 | 1.00E−14 | Cell division |
| | | | | | | | inhibitor MinC. |
| 13 | 31940 | 18573 | 18818 | MCA101811 | g606245 | 9.00E−23 | 30S ribosomal subunit |
| | | | | | | | protein S17 |
| 13 | 31940 | 31291 | 31908 | MCA101812 | g1173841 | 4.00E−62 | 3-ketoacyl-ACP |
| | | | | | | | reductase |
| 13 | 31940 | 27617 | 28207 | MCA101856 | g1742075 | 2.00E−29 | ORF_ID: o253#4; similar |
| | | | | | | | to [P45847] |
| 13 | 31940 | 28272 | 28676 | MCA101857 | g1788666 | 7.00E−34 | putative transporting |
| | | | | | | | ATPase |
| 13 | 31940 | 13809 | 14117 | MCA101858 | g1573786 | 4.00E−45 | ribosomal protein S10 |
| | | | | | | | (rpS10) |
| 13 | 31940 | 5219 | 5743 | MCA101999 | g2231996 | 2.00E−06 | cytochrome c5 |
| 14 | 19619 | 11690 | 13288 | MCA100149 | g1001407 | 2.00E−80 | iron utilization |
| | | | | | | | protein |
| 14 | 19619 | 18587 | 19294 | MCA100717 | g2314220 | 4.00E−26 | phosphatidylserine |
| | | | | | | | synthase (pssA) |
| 14 | 19619 | 17517 | 18404 | MCA100718 | g1573417 | 5.00E−39 | orfJ protein |
| 14 | 19619 | 16112 | 16555 | MCA100720 | g1573816 | 9.00E−36 | H. influenzae |
| | | | | | | | predicted coding |
| | | | | | | | region HI0787 |
| 14 | 19619 | 14601 | 15785 | MCA100721 | g4210610 | e−110 | DapE |
| 14 | 19619 | 13561 | 14508 | MCA100722 | g1651916 | 8.00E−78 | iron transport protein |
| 14 | 19619 | 759 | 1838 | MCA100895 | g1574693 | 5.00E−72 | UDP-N- |
| | | | | | | | acetylglucosamine |
| 14 | 19619 | 2157 | 2699 | MCA100896 | g2632721 | 3.00E−18 | similar to |
| | | | | | | | acetyltransferase |
| 14 | 19619 | 2894 | 4285 | MCA100897 | g42056 | e−148 | (UDP-N-acetylmuramate: |
| | | | | | | | L-alanine ligase) |
| 14 | 19619 | 4384 | 5265 | MCA100898 | g1574696 | 4.00E−78 | D-alanine--D-alanine |
| | | | | | | | ligase (ddlB) |
| 14 | 19619 | 5654 | 5914 | MCA100899 | g2622037 | 9.00E−11 | unknown |
| 14 | 19619 | 5994 | 6857 | MCA100900 | g2098748 | 3.00E−49 | oxidative stress |
| | | | | | | | transcriptional |
| | | | | | | | regulator; OxyR |
| 14 | 19619 | 7087 | 7644 | MCA100901 | g1064782 | 2.00E−63 | alkyl hydroperoxide |
| | | | | | | | reductase |
| 14 | 19619 | 8407 | 9966 | MCA100903 | g1786823 | e−135 | alkyl hydroperoxide |
| | | | | | | | reductase, F52a |
| | | | | | | | subunit |
| 14 | 19619 | 10365 | 10556 | MCA100904 | g1799927 | 5.00E−17 | similar to [P37096] |
| 14 | 19619 | 10801 | 11643 | MCA100905 | g4514346 | 2.00E−67 | MsmX |
| 14 | 19619 | 6 | 629 | MCA101403 | g882476 | 3.00E−57 | glutathione synthetase |
| 15 | 28626 | 10223 | 10792 | MCA100003 | | | |
| 15 | 28626 | 27408 | 28103 | MCA100097 | g403436 | 3.00E−27 | repressor protein |
| 15 | 28626 | 24288 | 24542 | MCA100178 | g1001663 | 4.00E−16 | rare lipoprotein A |
| 15 | 28626 | 16822 | 17763 | MCA100385 | g453969 | e−103 | coproporphyrinogen |
| | | | | | | | oxidase |
| 15 | 28626 | 17790 | 18383 | MCA100386 | g1573172 | 2.00E−52 | GTP cyclohydrolase II |
| | | | | | | | (ribA) |
| 15 | 28626 | 12359 | 13507 | MCA100396 | g1684734 | 2.00E−44 | ORF396 protein |
| 15 | 28626 | 10910 | 12217 | MCA100397 | g146020 | 2.00E−78 | folypolyglutamate |
| | | | | | | | synthetase- |
| | | | | | | | dihydrofolate |
| | | | | | | | synthetase |
| 15 | 28626 | 1297 | 2204 | MCA100824 | g1786319 | 7.00E−91 | putative ATP-binding |
| | | | | | | | component of a |
| | | | | | | | transport system |
| 15 | 28626 | 2319 | 3065 | MCA100825 | g1786320 | 9.00E−75 | orf, hypothetical |
| | | | | | | | protein |
| 15 | 28626 | 3176 | 3997 | MCA100826 | g882689 | 2.00E−48 | ORF_o282 |
| 15 | 28626 | 6151 | 6777 | MCA100828 | g141797 | 6.00E−51 | phosphoribosyl |
| | | | | | | | anthranilate isomerase |
| 15 | 28626 | 6927 | 8117 | MCA100829 | g141798 | e−172 | tryptophan synthase |
| | | | | | | | beta-subunit |
| 15 | 28626 | 8163 | 8981 | MCA100830 | g144288 | 6.00E−51 | tryptophan synthase A |
| | | | | | | | protein (EC 4.2.1.20) |
| 15 | 28626 | 766 | 1017 | MCA100987 | g2865528 | 2.00E−10 | mono-heme c-type |
| | | | | | | | cytochrome ScyA |
| 15 | 28626 | 9250 | 10096 | MCA101005 | g1788655 | 2.00E−78 | acetylCoA carboxylase, |
| | | | | | | | carboxytransferase |
| | | | | | | | beta subunit |
| 15 | 28626 | 13890 | 14987 | MCA101042 | | | |
| 15 | 28626 | 15277 | 15660 | MCA101046 | | | |
| 15 | 28626 | 15667 | 15975 | MCA101766 | | | |
| 15 | 28626 | 4067 | 5800 | MCA101839 | g1573733 | 0 | prolyl-tRNA synthetase |
| | | | | | | | (proS) |
| 15 | 28626 | 18809 | 20821 | MCA101840 | g1574278 | e−166 | 1-deoxyxylulose-5- |
| | | | | | | | phosphate synthase (E. |
| | | | | | | | coli) |
| 15 | 28626 | 20981 | 21787 | MCA101843 | g1573958 | 4.00E−56 | extragenic suppressor |
| | | | | | | | (suhB) |
| 15 | 28626 | 22787 | 23935 | MCA101845 | g1657482 | 2.00E−13 | hypothetical protein |
| 15 | 28626 | 28257 | 28442 | MCA101846 | g403437 | 2.00E−11 | putative |
| 16 | 22407 | 21035 | 22123 | MCA100084 | g1573365 | e−141 | conserved hypothetical |
| | | | | | | | GTP-binding protein |
| 16 | 22407 | 3904 | 4449 | MCA100337 | g3091146 | 7.00E−25 | iron-starvation |
| | | | | | | | protein PigA |
| 16 | 22407 | 19532 | 20179 | MCA100398 | g3402250 | 4.00E−25 | putative |
| | | | | | | | transcriptional |
| | | | | | | | regulator |
| 16 | 22407 | 18427 | 19210 | MCA100399 | g1079662 | 1.00E−54 | catabolite repression |
| | | | | | | | control protein |
| 16 | 22407 | 16346 | 18019 | MCA100400 | g2649804 | 4.00E−70 | L-lactate permease |
| | | | | | | | (lctP) |
| 16 | 22407 | 152 | 415 | MCA101103 | | | |
| 16 | 22407 | 471 | 1757 | MCA101104 | g507736 | e−167 | PurA |
| 16 | 22407 | 2286 | 2729 | MCA101106 | g2909463 | 2.00E−08 | hypothetical protein |
| | | | | | | | Rv0274 |
| 16 | 22407 | 2747 | 2950 | MCA101107 | | | |
| 16 | 22407 | 2940 | 3770 | MCA101108 | g3261756 | 9.00E−14 | hypothetical protein |
| | | | | | | | Rv0939 |
| 16 | 22407 | 4923 | 5546 | MCA101110 | g1574542 | 5.00E−78 | endonuclease III (nth) |
| 16 | 22407 | 5747 | 6997 | MCA101111 | g1787188 | 2.00E−62 | putative ATP-dependent |
| | | | | | | | protease |
| 16 | 22407 | 8306 | 8893 | MCA101113 | g581247 | 2.00E−32 | gidB protein |
| 16 | 22407 | 8949 | 9728 | MCA101114 | g45713 | 2.00E−49 | unnamed protein |
| | | | | | | | product |
| 16 | 22407 | 9744 | 10025 | MCA101115 | | | |
| 16 | 22407 | 10335 | 11093 | MCA101116 | g45714 | 4.00E−59 | unnamed protein |
| | | | | | | | product |
| 16 | 22407 | 11190 | 12152 | MCA101117 | g1573007 | 3.00E−49 | conserved hypothetical |
| | | | | | | | protein |
| 16 | 22407 | 12332 | 13051 | MCA101118 | g1651444 | 1.00E−53 | 3-deoxy-manno- |
| | | | | | | | octulosonate |
| | | | | | | | cytidylyltransferase |
| 16 | 22407 | 13087 | 13668 | MCA101119 | | | |
| 16 | 22407 | 13707 | 14210 | MCA101120 | g972778 | 3.00E−23 | homology to delta |
| | | | | | | | subunit of DNA |
| | | | | | | | polymerase III |
| 16 | 22407 | 14905 | 16044 | MCA101122 | g1381737 | e−170 | lactate dehydrogenase |
| 17 | 23210 | 18014 | 20569 | MCA100120 | g2772586 | 0 | high molecular weight |
| | | | | | | | outer membrane protein |
| 17 | 23210 | 505 | 1527 | MCA101311 | g3170587 | e−105 | glyceraldehyde-3- |
| | | | | | | | phosphate |
| | | | | | | | dehydrogenase homolog |
| 17 | 23210 | 2353 | 3555 | MCA101313 | g1573894 | e−102 | GTP-binding protein |
| | | | | | | | (yhbZ) |
| 17 | 23210 | 3919 | 4956 | MCA101314 | g409791 | e−104 | uroporphyrinogen |
| | | | | | | | decarboxylase |
| 17 | 23210 | 6000 | 7055 | MCA101316 | g4154933 | 3.00E−71 | Protease DO |
| 17 | 23210 | 7823 | 8527 | MCA101318 | g1573324 | 1.00E−40 | ABC transporter, |
| | | | | | | | permease protein |
| 17 | 23210 | 8692 | 9441 | MCA101319 | g1431416 | 2.00E−12 | ORF YDL244w |
| 17 | 23210 | 9572 | 10231 | MCA101320 | g2293296 | 1.00E−34 | putative transporter |
| 17 | 23210 | 11483 | 12235 | MCA101323 | | | |
| 17 | 23210 | 13108 | 14196 | MCA101325 | g47094 | e−107 | 3-phosphoserine |
| | | | | | | | aminotransferase (AA |
| | | | | | | | 1-362) |
| 17 | 23210 | 14309 | 15082 | MCA101326 | g1552782 | 5.00E−42 | hypothetical protein |
| 17 | 23210 | 15932 | 17658 | MCA101328 | g452382 | e−150 | 2-isopropylmalate |
| | | | | | | | synthase |
| 17 | 23210 | 7143 | 7448 | MCA101647 | g1652439 | 6.00E−08 | hypothetical protein |
| 17 | 23210 | 15246 | 15692 | MCA101649 | g2217944 | 2.00E−26 | Lrp-family |
| | | | | | | | transcriptional |
| | | | | | | | regulators |
| 17 | 23210 | 10452 | 10742 | MCA101666 | g1001663 | 1.00E−23 | rare lipoprotein A |
| 17 | 23210 | 20720 | 21990 | MCA101696 | g537207 | 7.00E−40 | ORF_f277 |
| 17 | 23210 | 22380 | 22529 | MCA101725 | g996086 | 1.00E−09 | ORFY; non-essential |
| | | | | | | | for pilus assembly |
| 17 | 23210 | 22985 | 23149 | MCA101847 | | | |
| 17 | 23210 | 12265 | 13008 | MCA101963 | | | |
| 18 | 34001 | 23020 | 23238 | MCA100089 | | | |
| 18 | 34001 | 24445 | 24774 | MCA100093 | | | |
| 18 | 34001 | 27135 | 28022 | MCA100416 | g1890655 | 4.00E−90 | UDP-3-O-acyl-GlcNAc |
| | | | | | | | deacetylase |
| 18 | 34001 | 29225 | 29902 | MCA100418 | | | |
| 18 | 34001 | 31130 | 31741 | MCA100421 | g746400 | 7.00E−53 | regulatory protein |
| 18 | 34001 | 15193 | 15909 | MCA100448 | g496598 | 2.00E−69 | ORF1 |
| 18 | 34001 | 184 | 930 | MCA100873 | g1209054 | 3.00E−87 | EtfS |
| 18 | 34001 | 972 | 1898 | MCA100874 | g1209055 | 6.00E−90 | EtfL |
| 18 | 34001 | 4318 | 5247 | MCA100877 | g309885 | e−100 | ‘aspartate |
| | | | | | | | transcarbamoylase’ |
| 18 | 34001 | 5421 | 6119 | MCA100878 | g1786864 | 2.00E−43 | orf, hypothetical |
| | | | | | | | protein |
| 18 | 34001 | 6359 | 7432 | MCA100879 | g309886 | 3.00E−73 | dihydroorotase-like |
| 18 | 34001 | 7488 | 8273 | MCA100880 | g2113931 | 9.00E−18 | citE |
| 18 | 34001 | 23341 | 23862 | MCA101248 | | | |
| 18 | 34001 | 26268 | 26834 | MCA101720 | g433670 | 1.00E−70 | elongation factor P |
| 18 | 34001 | 2166 | 2930 | MCA101753 | g1653441 | 1.00E−20 | rRNA methylase |
| 18 | 34001 | 3046 | 4006 | MCA101756 | g901869 | 2.00E−78 | fructose-1,6-/ |
| | | | | | | | sedoheptulose-1,7- |
| | | | | | | | bisphosphate |
| | | | | | | | phosphatase |
| 18 | 34001 | 9314 | 10354 | MCA101758 | g1788660 | 2.00E−42 | erythronate-4- |
| | | | | | | | phosphate dehyrogenase |
| 18 | 34001 | 10507 | 11499 | MCA101759 | g2983326 | 3.00E−28 | hypothetical protein |
| 18 | 34001 | 11730 | 12191 | MCA101764 | g1786586 | 2.00E−29 | orf, hypothetical |
| | | | | | | | protein |
| 18 | 34001 | 25125 | 26090 | MCA101767 | g1790589 | 7.00E−77 | orf, hypothetical |
| | | | | | | | protein |
| 18 | 34001 | 12249 | 13307 | MCA101768 | g1621601 | 7.00E−67 | PurK |
| 18 | 34001 | 13435 | 13911 | MCA101769 | g1574461 | 1.00E−53 | phosphoribosylaminoimi |
| | | | | | | | dazole carboxylase |
| 18 | 34001 | 8282 | 9238 | MCA101775 | g41552 | 7.00E−58 | genX |
| 18 | 34001 | 21669 | 22925 | MCA101780 | | | |
| 18 | 34001 | 23957 | 24285 | MCA101781 | g2649731 | 6.00E−23 | conserved hypothetical |
| | | | | | | | protein |
| 18 | 34001 | 31862 | 33821 | MCA101782 | g746401 | 0 | ATP-binding protein |
| 18 | 34001 | 30667 | 30945 | MCA101796 | g1750388 | 2.00E−19 | orf2 |
| 18 | 34001 | 15937 | 16377 | MCA101803 | g2314656 | 2.00E−16 | conserved hypothetical |
| | | | | | | | integral membrane |
| | | | | | | | protein |
| 18 | 34001 | 16523 | 18349 | MCA101806 | g2896133 | 3.00E−24 | outer membrane |
| | | | | | | | esterase |
| 18 | 34001 | 18662 | 19597 | MCA101808 | g2294845 | e−103 | biotin synthase |
| 18 | 34001 | 20305 | 20988 | MCA101813 | g3417415 | 1.00E−44 | phosphoserine |
| | | | | | | | phosphatase |
| 19 | 33778 | 32970 | 33659 | MCA100015 | g2459964 | 2.00E−36 | HisX |
| 19 | 33778 | 20378 | 21868 | MCA100026 | g608530 | e−106 | L-aspartate oxidase |
| 19 | 33778 | 15834 | 16912 | MCA100127 | g968930 | e−132 | peptide chain release |
| | | | | | | | factor 1 |
| 19 | 33778 | 17205 | 18047 | MCA100128 | g1498753 | 9.00E−76 | nicotinate-nucleotide |
| | | | | | | | pyrophosphorylase |
| 19 | 33778 | 19349 | 20326 | MCA100320 | g1651337 | e−116 | Quinolinate synthetase |
| | | | | | | | A. |
| 19 | 33778 | 10305 | 11824 | MCA100473 | g2313949 | 1.00E−98 | osmoprotection protein |
| | | | | | | | (proWX) |
| 19 | 33778 | 12732 | 14177 | MCA100475 | g1789015 | e−165 | succinate-semialdehyde |
| | | | | | | | dehydrogenase, NADP− |
| | | | | | | | dependent |
| 19 | 33778 | 2058 | 2579 | MCA100756 | | | |
| 19 | 33778 | 4059 | 4889 | MCA100758 | | | |
| 19 | 33778 | 31220 | 32257 | MCA100768 | g2695825 | 4.00E−58 | corA |
| 19 | 33778 | 29370 | 31016 | MCA100769 | g1573928 | e−119 | glutathione-regulated |
| | | | | | | | potassium efflux |
| | | | | | | | system protein |
| 19 | 33778 | 27814 | 29127 | MCA100770 | g1573294 | 3.00E−98 | conserved hypothetical |
| | | | | | | | protein |
| 19 | 33778 | 25151 | 27505 | MCA100771 | g2959335 | 0 | Lon-protease |
| 19 | 33778 | 24481 | 25038 | MCA100772 | g1754527 | 4.00E−16 | intracellular |
| | | | | | | | septation A |
| 19 | 33778 | 23332 | 23889 | MCA100774 | g3916254 | 2.00E−25 | ExbB |
| 19 | 33778 | 23892 | 24287 | MCA100946 | g3916255 | 1.00E−23 | ExbD |
| 19 | 33778 | 9106 | 9774 | MCA101121 | g927800 | 2.00E−20 | Ydr533cp; CAI: 0.24 |
| 19 | 33778 | 219 | 1652 | MCA101802 | | | |
| 19 | 33778 | 3487 | 3846 | MCA101805 | | | |
| 19 | 33778 | 4651 | 4911 | MCA101974 | | | |
| 19 | 33778 | 6334 | 6705 | MCA101975 | | | |
| 19 | 33778 | 2811 | 3494 | MCA101977 | | | |
| 19 | 33778 | 22342 | 23226 | MCA102006 | | | |
| 2 | 1169 | 157 | 555 | MCA100759 | g2633670 | 2.00E−17 | yzzE; similar to |
| | | | | | | | general stress protein |
| 2 | 1169 | 795 | 1166 | MCA101009 | g3929904 | 5.00E−18 | fumarate hydratase B, |
| | | | | | | | beta subunit |
| 20 | 31063 | 848 | 1366 | MCA100998 | g396321 | 2.00E−57 | nusG |
| 20 | 31063 | 1476 | 1898 | MCA100999 | g2367334 | 7.00E−51 | 50S ribosomal subunit |
| | | | | | | | protein L11 |
| 20 | 31063 | 1907 | 2581 | MCA101000 | g47257 | 2.00E−62 | L1 protein (AA 1-234) |
| 20 | 31063 | 2920 | 3411 | MCA101001 | g1573638 | 9.00E−63 | ribosomal protein L10 |
| | | | | | | | (rpL10) |
| 20 | 31063 | 3481 | 3852 | MCA101002 | g1573639 | 7.00E−25 | ribosomal protein |
| | | | | | | | L7/L12 (rpL7/L12) |
| 20 | 31063 | 4275 | 8360 | MCA101003 | g45729 | 0 | beta-subunit of RNA |
| | | | | | | | polymerase |
| 20 | 31063 | 8446 | 12564 | MCA101004 | g2367335 | 0 | RNA polymerase, beta |
| | | | | | | | prime subunit |
| 20 | 31063 | 12905 | 14122 | MCA101239 | g1573443 | e−146 | D-3-phosphoglycerate |
| | | | | | | | dehydrogenase (serA) |
| 20 | 31063 | 14321 | 15688 | MCA101240 | g1573119 | e−171 | glutathione reductase |
| | | | | | | | (gor) |
| 20 | 31063 | 16095 | 16997 | MCA101241 | g4062671 | 6.00E−73 | Hypothetical protein |
| | | | | | | | HI0959 |
| 20 | 31063 | 17242 | 19314 | MCA101242 | g1574519 | 6.00E−81 | tail specific protease |
| | | | | | | | (prc) |
| 20 | 31063 | 20177 | 20935 | MCA101244 | g1573922 | 4.00E−28 | conserved hypothetical |
| | | | | | | | protein |
| 20 | 31063 | 21988 | 22695 | MCA101246 | g2314002 | 5.00E−13 | H. pylori predicted |
| | | | | | | | coding region HP0862 |
| 20 | 31063 | 23138 | 23536 | MCA101247 | g1888564 | 7.00E−36 | ORFX |
| 20 | 31063 | 24093 | 24545 | MCA101249 | g4545247 | 6.00E−53 | invasion protein |
| | | | | | | | homolog |
| 20 | 31063 | 24726 | 26248 | MCA101250 | g2633966 | 5.00E−49 | chromosome segregation |
| | | | | | | | SMC protein homolog |
| 20 | 31063 | 28591 | 29325 | MCA101251 | g296030 | 4.00E−97 | ribosomal protein S2 |
| 20 | 31063 | 29460 | 30314 | MCA101252 | g1552747 | 4.00E−61 | elongation factor EF- |
| | | | | | | | Ts |
| 20 | 31063 | 30482 | 31063 | MCA101253 | g1079661 | 2.00E−47 | orotate phosphoribosyl |
| | | | | | | | transferase |
| 20 | 31063 | 26531 | 28321 | MCA101493 | g1237015 | 4.00E−44 | ORF4 |
| 20 | 31063 | 350 | 823 | MCA101880 | | | |
| 20 | 31063 | 21040 | 21933 | MCA101950 | g2983199 | 5.00E−07 | biotin [acetyl-CoA- |
| | | | | | | | carboxylase] ligase |
| 21 | 39003 | 30165 | 31499 | MCA100007 | g1772845 | e−130 | NAD (P) H-dependent |
| | | | | | | | glutamate |
| | | | | | | | dehydrogenase |
| 21 | 39003 | 28829 | 29935 | MCA100118 | g1786552 | e−134 | glutathione-dependent |
| | | | | | | | formaldehyde |
| | | | | | | | dehydrogenase |
| 21 | 39003 | 25255 | 26679 | MCA100217 | g1787999 | 4.00E−77 | orf, hypothetical |
| | | | | | | | protein |
| 21 | 39003 | 27082 | 27942 | MCA100218 | | | |
| 21 | 39003 | 27992 | 28813 | MCA100219 | g405878 | 1.00E−86 | probable esterase |
| 21 | 39003 | 20225 | 20965 | MCA100226 | g3220185 | 3.00E−31 | pteridine reductase |
| 21 | 39003 | 19027 | 20070 | MCA100227 | g882578 | 7.00E−55 | CG Site No. 933 |
| 21 | 39003 | 21277 | 22656 | MCA100347 | g1736694 | e−126 | Proline transport |
| | | | | | | | protein |
| 21 | 39003 | 24025 | 24876 | MCA100349 | g2570906 | 1.00E−64 | stearoyl-CoA |
| | | | | | | | desaturase |
| 21 | 39003 | 35864 | 38086 | MCA100561 | g1763284 | e−163 | penicillin-binding |
| | | | | | | | protein 1A |
| 21 | 39003 | 33490 | 35418 | MCA100562 | g862902 | 0 | high temperature |
| | | | | | | | protein G |
| 21 | 39003 | 8041 | 9210 | MCA101029 | g1806239 | 1.00E−35 | lipD |
| 21 | 39003 | 16664 | 18907 | MCA101134 | g1788806 | 0 | putative multimodular |
| | | | | | | | enzyme |
| 21 | 39003 | 15338 | 16315 | MCA101135 | g1009431 | e−106 | porphobilinogen |
| | | | | | | | synthase |
| 21 | 39003 | 13425 | 14354 | MCA101137 | g42903 | e−119 | ruvB gene product (AA |
| | | | | | | | 1-336) |
| 21 | 39003 | 12028 | 13293 | MCA101138 | g2909447 | e−147 | fadA2 |
| 21 | 39003 | 10330 | 11691 | MCA101140 | g3063883 | 8.00E−92 | putative 3-oxoacyl- |
| | | | | | | | [acyl-carrier protein] |
| | | | | | | | reductase |
| 21 | 39003 | 9377 | 10174 | MCA101141 | g2909445 | 3.00E−35 | hypothetical protein |
| | | | | | | | Rv0241c |
| 21 | 39003 | 7384 | 7893 | MCA101143 | g3046326 | 4.00E−55 | hypoxanthine |
| | | | | | | | phosphoribosyltransferase |
| 21 | 39003 | 4877 | 6769 | MCA101145 | g288532 | 0 | dihydroxy acid |
| 21 | 39003 | 2806 | 4254 | MCA101147 | g2078066 | 5.00E−97 | betP |
| 21 | 39003 | 1461 | 2414 | MCA101149 | g1001519 | 3.00E−23 | hypothetical protein |
| 21 | 39003 | 559 | 1209 | MCA101201 | | | |
| 21 | 39003 | 116 | 433 | MCA101854 | g2226116 | 2.00E−16 | hypothetical protein |
| 21 | 39003 | 38281 | 38810 | MCA101855 | g972976 | 3.00E−20 | 1-acyl-sn-glycerol-3- |
| | | | | | | | phosphate |
| | | | | | | | acyltransferase |
| 21 | 39003 | 6901 | 7305 | MCA101863 | | | |
| 21 | 39003 | 14701 | 15213 | MCA101864 | | | |
| 22 | 45613 | 33275 | 34222 | MCA100119 | g1786405 | 3.00E−57 | transcriptional |
| | | | | | | | regulator for nitrite |
| | | | | | | | reductase |
| 22 | 45613 | 31023 | 32033 | MCA100130 | g1653241 | 1.00E−40 | hemolysin |
| 22 | 45613 | 13590 | 14525 | MCA100133 | g476229 | e−150 | isopropylmalate |
| | | | | | | | dehydrogenase |
| 22 | 45613 | 40430 | 41209 | MCA100144 | g1799842 | 7.00E−62 | sulfate/thiosulfate |
| | | | | | | | transport protein cysW |
| 22 | 45613 | 41338 | 42090 | MCA100171 | g1799853 | 9.00E−60 | sulfate transport |
| | | | | | | | system permease |
| | | | | | | | protein cyst. |
| 22 | 45613 | 42522 | 42968 | MCA100210 | | | |
| 22 | 45613 | 42993 | 44153 | MCA100212 | g1573911 | 4.00E−84 | ATP-dependent RNA |
| | | | | | | | helicase (rhlB) |
| 22 | 45613 | 44209 | 45369 | MCA100213 | g1573441 | 2.00E−87 | oxygen-independent |
| | | | | | | | coproporphyrinogen III |
| | | | | | | | oxidase |
| 22 | 45613 | 10853 | 13060 | MCA100223 | g1000692 | 0 | LeuA |
| 22 | 45613 | 536 | 1627 | MCA100312 | g1790487 | 4.00E−49 | alanine racemase 1 |
| 22 | 45613 | 1693 | 3003 | MCA100313 | g145763 | e−106 | DnaB replication |
| | | | | | | | protein (dnaB) |
| 22 | 45613 | 3266 | 4333 | MCA100314 | g1786237 | 3.00E−66 | pyridoxine |
| | | | | | | | biosynthesis |
| 22 | 45613 | 8040 | 9071 | MCA100353 | g3758880 | e−153 | fructose-1,6- |
| | | | | | | | bisphosphate aldolase |
| 22 | 45613 | 9074 | 9676 | MCA100354 | g1573280 | 4.00E−29 | Holliday junction DNA |
| | | | | | | | helicase (ruvA) |
| 22 | 45613 | 10292 | 10609 | MCA100356 | g1850796 | 6.00E−19 | CynR protein |
| 22 | 45613 | 30261 | 30536 | MCA100450 | g1573206 | 3.00E−17 | conserved hypothetical |
| | | | | | | | protein |
| 22 | 45613 | 28267 | 30132 | MCA100451 | g3983168 | e−141 | SecD |
| 22 | 45613 | 27163 | 28047 | MCA100452 | g1573204 | 4.00E−55 | protein-export |
| | | | | | | | membrane protein |
| | | | | | | | (secF) |
| 22 | 45613 | 26200 | 26925 | MCA100453 | g1518782 | 4.00E−38 | penicillin-binding |
| | | | | | | | protein 5 |
| 22 | 45613 | 39609 | 40322 | MCA100541 | g1799841 | 2.00E−67 | sulfate/thiosulfate |
| | | | | | | | transport protein cysA |
| 22 | 45613 | 38143 | 39546 | MCA100542 | g1881700 | e−143 | RadA |
| 22 | 45613 | 36060 | 37833 | MCA100543 | g1680533 | 0 | phospho enol pyruvate |
| | | | | | | | carboxykinase |
| 22 | 45613 | 34862 | 35839 | MCA100544 | g2226145 | 4.00E−30 | hypothetical protein |
| 22 | 45613 | 15396 | 16193 | MCA100678 | g1572987 | 2.00E−90 | exodeoxyribonuclease |
| | | | | | | | III (xthA) |
| 22 | 45613 | 16548 | 18068 | MCA100679 | g1359473 | 0 | lysyl-tRNA-synthase |
| 22 | 45613 | 18097 | 19173 | MCA100680 | g1574159 | e−104 | DNA polymerase III, |
| | | | | | | | subunits gamma and tau |
| | | | | | | | (dnaX) |
| 22 | 45613 | 20776 | 21252 | MCA100682 | g924993 | 8.00E−19 | transcriptional |
| | | | | | | | regulator LtrA |
| 22 | 45613 | 21816 | 22710 | MCA100684 | g1786984 | 3.00E−32 | putative |
| | | | | | | | transcriptional |
| | | | | | | | regulator LYSR-type |
| 22 | 45613 | 22855 | 23910 | MCA100685 | g2108220 | 1.00E−88 | hemolysin |
| 22 | 45613 | 24272 | 25591 | MCA100686 | g2209268 | 3.00E−69 | Na+/H+ antiporter |
| 22 | 45613 | 5347 | 6123 | MCA100727 | g1573537 | 1.00E−51 | diadenosine- |
| | | | | | | | tetraphosphatase |
| | | | | | | | (apaH) |
| 22 | 45613 | 4478 | 5278 | MCA100787 | g1786236 | 7.00E−62 | S-adenosylmethionine- |
| | | | | | | | 6-N′,N′-adenosyl |
| | | | | | | | dimethyltransferase |
| 22 | 45613 | 6267 | 7456 | MCA101090 | g41422 | e−121 | phosphoglycerate |
| | | | | | | | kinase (AA 1-387) |
| 22 | 45613 | 32181 | 32786 | MCA101784 | | | |
| 23 | 33140 | 647 | 814 | MCA100041 | | | |
| 23 | 33140 | 2719 | 3444 | MCA100603 | g2330641 | 1.00E−22 | htrB |
| 23 | 33140 | 3463 | 5241 | MCA100604 | g1788173 | 0 | aspartate tRNA |
| | | | | | | | synthetase |
| 23 | 33140 | 5822 | 7239 | MCA100606 | g4062776 | 5.00E−83 | ORF_ID: o245#1 |
| 23 | 33140 | 7701 | 8581 | MCA100608 | g1574534 | 1.00E−72 | protease, putative |
| | | | | | | | (sohB) |
| 23 | 33140 | 8907 | 9644 | MCA100609 | g1524217 | 3.00E−47 | hypothetical protein |
| | | | | | | | Rv0945 |
| 23 | 33140 | 9956 | 10741 | MCA100610 | g41424 | 3.00E−45 | ORF4 (AA 1-197) |
| 23 | 33140 | 31971 | 33044 | MCA100705 | g1788953 | 8.00E−98 | 3-deoxy-D- |
| | | | | | | | arabinoheptulosonate- |
| | | | | | | | 7-phosphate synthase |
| 23 | 33140 | 10882 | 11415 | MCA101509 | g1573653 | 8.00E−53 | DNA-3-methyladenine |
| | | | | | | | glycosidase I (tagI) |
| 23 | 33140 | 11492 | 12220 | MCA101510 | g3046322 | 2.00E−69 | O-acetylserine |
| | | | | | | | synthase; CysE2 |
| 23 | 33140 | 12686 | 13213 | MCA101511 | g3046324 | 1.00E−24 | unknown |
| 23 | 33140 | 13720 | 16956 | MCA101513 | g940886 | 0 | DNA polymerase III |
| | | | | | | | holoenzyme alpha |
| | | | | | | | subunit |
| 23 | 33140 | 17151 | 18281 | MCA101514 | g1573367 | 3.00E−93 | conserved hypothetical |
| | | | | | | | protein |
| 23 | 33140 | 18669 | 19625 | MCA101515 | g1799725 | 2.00E−69 | similar to [SwissProt |
| | | | | | | | Accession Number |
| | | | | | | | P39199] |
| 23 | 33140 | 19870 | 20970 | MCA101516 | g1162959 | e−123 | homologous to HI0365 |
| | | | | | | | in Haemophilus |
| | | | | | | | influenzae; ORF1 |
| 23 | 33140 | 21062 | 21676 | MCA101517 | | | |
| 23 | 33140 | 21735 | 22844 | MCA101518 | g1531668 | e−122 | AarC |
| 23 | 33140 | 22996 | 23775 | MCA101519 | g4155368 | 3.00E−53 | putative |
| 23 | 33140 | 23844 | 25085 | MCA101520 | g1573338 | e−117 | histidyl-tRNA |
| | | | | | | | synthetase (hisS) |
| 23 | 33140 | 25203 | 26036 | MCA101521 | g1573339 | 1.00E−12 | conserved hypothetical |
| | | | | | | | protein |
| 23 | 33140 | 26145 | 27266 | MCA101522 | g1805571 | 8.00E−33 | serine/threonine |
| | | | | | | | protein kinase (EC |
| | | | | | | | 2.7.1.—) |
| 23 | 33140 | 27407 | 28831 | MCA101523 | g1788858 | e−153 | putative GTP-binding |
| | | | | | | | factor |
| 23 | 33140 | 28941 | 29570 | MCA101524 | g2633978 | 1.00E−30 | ribonuclease H |
| 23 | 33140 | 29683 | 30894 | MCA101525 | g1694783 | 2.00E−67 | 1pxB |
| 23 | 33140 | 31117 | 31638 | MCA101526 | g1787602 | 4.00E−11 | orf, hypothetical |
| | | | | | | | protein |
| 23 | 33140 | 136 | 480 | MCA101883 | | | |
| 23 | 33140 | 882 | 1604 | MCA101889 | | | |
| 24 | 33248 | 31423 | 31823 | MCA101434 | g1046241 | 8.00E−16 | orf14 |
| 24 | 33248 | 25628 | 29158 | MCA101438 | g1651549 | 0 | Transcription-repair |
| | | | | | | | coupling protein mfd |
| 24 | 33248 | 24151 | 25353 | MCA101439 | g1685080 | 5.00E−30 | TolB |
| 24 | 33248 | 22836 | 23243 | MCA101441 | g1103861 | 1.00E−17 | TolR |
| 24 | 33248 | 22115 | 22702 | MCA101442 | g1103860 | 1.00E−37 | TolQ |
| 24 | 33248 | 17684 | 21622 | MCA101443 | g1574628 | 0 | ATP-dependent helicase |
| | | | | | | | (hrpa) |
| 24 | 33248 | 15920 | 16918 | MCA101445 | g2314661 | 2.00E−13 | lipase-like protein |
| 24 | 33248 | 14698 | 15579 | MCA101446 | g1840154 | 9.00E−36 | 36 kDa protein |
| 24 | 33248 | 13519 | 14589 | MCA101447 | g4155989 | 1.00E−12 | putative |
| 24 | 33248 | 12383 | 13468 | MCA101448 | g2314658 | 7.00E−25 | conserved hypothetical |
| | | | | | | | integral membrane |
| | | | | | | | protein |
| 24 | 33248 | 11331 | 11747 | MCA101450 | g1787709 | 2.00E−32 | orf, hypothetical |
| | | | | | | | protein |
| 24 | 33248 | 10560 | 11324 | MCA101451 | g3192702 | 6.00E−28 | gp19 |
| 24 | 33248 | 32602 | 33087 | MCA101505 | g1790034 | 3.00E−36 | orf, hypothetical |
| | | | | | | | protein |
| 24 | 33248 | 9940 | 10167 | MCA101507 | g1628368 | 1.00E−08 | gepA |
| 24 | 33248 | 5471 | 6674 | MCA101512 | g437700 | 5.00E−39 | traN |
| 24 | 33248 | 99 | 350 | MCA102008 | | | |
| 24 | 33248 | 1019 | 1525 | MCA102009 | | | |
| 24 | 33248 | 1526 | 2998 | MCA102010 | | | |
| 24 | 33248 | 2998 | 4413 | MCA102011 | | | |
| 24 | 33248 | 7022 | 8038 | MCA102014 | g2764860 | 9.00E−16 | gene 13 |
| 24 | 33248 | 8049 | 8252 | MCA102016 | | | |
| 24 | 33248 | 8313 | 8672 | MCA102017 | | | |
| 24 | 33248 | 23253 | 24080 | MCA102018 | | | |
| 24 | 33248 | 8674 | 9030 | MCA102026 | | | |
| 24 | 33248 | 9030 | 9377 | MCA102028 | | | |
| 24 | 33248 | 31013 | 31210 | MCA102029 | | | |
| 24 | 33248 | 32232 | 32447 | MCA102030 | | | |
| 25 | 31147 | 830 | 1147 | MCA100008 | g3776111 | 6.00E−32 | thioredoxin |
| 25 | 31147 | 3 | 593 | MCA100009 | g454841 | 3.00E−79 | |
| 25 | 31147 | 29786 | 30031 | MCA100048 | g1518927 | 1.00E−32 | ferredoxin |
| 25 | 31147 | 29298 | 29753 | MCA100049 | g1518926 | 2.00E−45 | protein for |
| | | | | | | | lipopolysaccharide |
| | | | | | | | core synthesis |
| 25 | 31147 | 12271 | 13725 | MCA100080 | g4200042 | 2.00E−81 | exopolyphosphatase |
| 25 | 31147 | 4751 | 5011 | MCA100380 | g663269 | 2.00E−13 | BolA |
| 25 | 31147 | 2616 | 4289 | MCA100381 | g2626753 | 2.00E−58 | sulfate transporter |
| 25 | 31147 | 1432 | 2072 | MCA100384 | g1786244 | 1.00E−36 | orf, hypothetical |
| | | | | | | | protein |
| 25 | 31147 | 6397 | 7359 | MCA100487 | g1052826 | 8.00E−97 | phosphate binding |
| | | | | | | | protein |
| 25 | 31147 | 7554 | 8459 | MCA100488 | g1574215 | 1.00E−70 | phosphate ABC |
| | | | | | | | transporter, permease |
| | | | | | | | protein (pstC) |
| 25 | 31147 | 8539 | 9348 | MCA100489 | g42397 | 9.00E−76 | phoT (pstA) gene |
| | | | | | | | product (aa 1-296) |
| 25 | 31147 | 9516 | 10262 | MCA100490 | g1790162 | 7.00E−94 | ABC transporter, high- |
| | | | | | | | affinity phosphate- |
| | | | | | | | specific |
| 25 | 31147 | 10496 | 11182 | MCA100491 | g1786599 | 6.00E−64 | positive response |
| | | | | | | | regulator for pho |
| | | | | | | | regulon |
| 25 | 31147 | 11382 | 12201 | MCA100492 | g3282775 | 6.00E−53 | histidine protein |
| | | | | | | | kinase PhoR |
| 25 | 31147 | 5110 | 5892 | MCA100803 | g1653285 | 6.00E−19 | hypothetical protein |
| 25 | 31147 | 14590 | 15696 | MCA101453 | | | |
| 25 | 31147 | 16710 | 17657 | MCA101456 | g2766195 | 3.00E−15 | putative permease BhiE |
| 25 | 31147 | 17742 | 18020 | MCA101457 | g2415545 | 2.00E−19 | permease protein |
| 25 | 31147 | 18338 | 19156 | MCA101458 | g1574806 | 7.00E−65 | spermidine/putrescine |
| | | | | | | | ABC transporter |
| 25 | 31147 | 19449 | 20102 | MCA101459 | g4539576 | 4.00E−10 | putative morphological |
| | | | | | | | differentiation- |
| | | | | | | | associated protein |
| 25 | 31147 | 20696 | 21667 | MCA101461 | g1881313 | 8.00E−80 | similar to alkanal |
| | | | | | | | monooxygenase alpha |
| | | | | | | | chain |
| 25 | 31147 | 21810 | 22436 | MCA101462 | g1788844 | 6.00E−70 | uracil |
| | | | | | | | phosphoribosyltransferase |
| 25 | 31147 | 23978 | 25966 | MCA101464 | g1574651 | 0 | DNA ligase (lig) |
| 25 | 31147 | 25990 | 26874 | MCA101465 | | | |
| 25 | 31147 | 27604 | 28056 | MCA101467 | g1788973 | 5.00E−48 | small protein B |
| 25 | 31147 | 28358 | 29119 | MCA101468 | g478986 | 1.00E−47 | NADPH-flavin |
| | | | | | | | oxidoreductase |
| 25 | 31147 | 15766 | 16581 | MCA101993 | g1360216 | 1.00E−06 | ORF YLL031c |
| 26 | 34279 | 24575 | 24982 | MCA100071 | g1787709 | 2.00E−33 | orf, hypothetical |
| | | | | | | | protein |
| 26 | 34279 | 23822 | 24559 | MCA100072 | g3192702 | 4.00E−32 | gp19 |
| 26 | 34279 | 25922 | 28576 | MCA100506 | g3192704 | 0 | gp21 |
| 26 | 34279 | 30501 | 30830 | MCA100508 | | | |
| 26 | 34279 | 30 | 378 | MCA100640 | g1574256 | 2.00E−24 | H. influenzae |
| | | | | | | | predicted coding |
| | | | | | | | region HI1422 |
| 26 | 34279 | 775 | 1820 | MCA100642 | g15152 | 4.00E−31 | alpha gene (pot.P4- |
| | | | | | | | specific DNA primase) |
| | | | | | | | (AA 1-777) |
| 26 | 34279 | 3747 | 4175 | MCA100645 | | | |
| 26 | 34279 | 4724 | 5230 | MCA100647 | | | |
| 26 | 34279 | 5715 | 7454 | MCA100648 | g3703076 | 5.00E−08 | putative terminase |
| | | | | | | | large subunit |
| 26 | 34279 | 25324 | 25890 | MCA100871 | g3192703 | 6.00E−26 | gp20 |
| 26 | 34279 | 7772 | 8620 | MCA101290 | g1574365 | 5.00E−78 | H. influenzae |
| | | | | | | | predicted coding |
| | | | | | | | region HI1523 |
| 26 | 34279 | 8726 | 8929 | MCA101291 | | | |
| 26 | 34279 | 8996 | 9613 | HCA101292 | | | |
| 26 | 34279 | 11030 | 11218 | MCA101295 | | | |
| 26 | 34279 | 11362 | 12360 | MCA101296 | g4126611 | 2.00E−21 | ORF25 |
| 26 | 34279 | 12828 | 13169 | MCA101297 | | | |
| 26 | 34279 | 13153 | 13626 | MCA101299 | | | |
| 26 | 34279 | 13623 | 13979 | MCA101300 | | | |
| 26 | 34279 | 14007 | 14438 | MCA101301 | | | |
| 26 | 34279 | 14521 | 14868 | MCA101302 | | | |
| 26 | 34279 | 14943 | 15191 | MCA101303 | | | |
| 26 | 34279 | 15247 | 15624 | MCA101304 | | | |
| 26 | 34279 | 15733 | 19257 | MCA101305 | g2392838 | 2.00E−07 | unknown |
| 26 | 34279 | 19350 | 19622 | MCA101306 | g2232363 | 2.00E−09 | lambda phage M tail |
| | | | | | | | component homolog |
| 26 | 34279 | 22634 | 23014 | MCA101309 | | | |
| 26 | 34279 | 23069 | 23783 | MCA101409 | g3192701 | 1.00E−44 | gp18 |
| 26 | 34279 | 4281 | 4589 | MCA101760 | | | |
| 26 | 34279 | 5384 | 5770 | MCA101762 | | | |
| 26 | 34279 | 30917 | 31486 | MCA101785 | | | |
| 26 | 34279 | 12525 | 12812 | MCA101793 | | | |
| 26 | 34279 | 10141 | 10902 | MCA101809 | g3172264 | 4.00E−12 | major head subunit; |
| | | | | | | | gp17 |
| 26 | 34279 | 21575 | 22135 | MCA101932 | | | |
| 26 | 34279 | 22098 | 22577 | MCA101933 | | | |
| 26 | 34279 | 7432 | 7626 | MCA101935 | | | |
| 26 | 34279 | 5227 | 5397 | MCA102035 | | | |
| 27 | 48328 | 3898 | 4593 | MCA100056 | | | |
| 27 | 48328 | 23080 | 24003 | MCA100073 | g3482882 | 2.00E−81 | unknown |
| 27 | 48328 | 1179 | 1733 | MCA100106 | | | |
| 27 | 48328 | 1882 | 2790 | MCA100107 | | | |
| 27 | 48328 | 43439 | 45661 | MCA100173 | g1786239 | 3.00E−52 | organic solvent |
| | | | | | | | tolerance |
| 27 | 48328 | 18470 | 18898 | MCA100206 | g2314029 | 3.00E−33 | conserved hypothetical |
| | | | | | | | protein |
| 27 | 48328 | 18957 | 19259 | MCA100207 | g3228385 | 1.00E−10 | DsrC |
| 27 | 48328 | 19608 | 19982 | MCA100208 | g606279 | 7.00E−14 | ORF_f128 |
| 27 | 48328 | 20280 | 22904 | MCA100209 | g1789433 | e−171 | adenylylating enzyme |
| | | | | | | | for glutamine |
| | | | | | | | synthetase |
| 27 | 48328 | 39728 | 40198 | MCA100292 | g41611 | 3.00E−53 | GreA protein |
| 27 | 48328 | 40220 | 40582 | MCA100293 | | | |
| 27 | 48328 | 40907 | 41812 | MCA100294 | g440377 | 8.00E−14 | 297 amino acids |
| | | | | | | | peptide, unknown |
| | | | | | | | function |
| 27 | 48328 | 41954 | 43224 | MCA100295 | g1786238 | 1.00E−28 | survival protein |
| 27 | 48328 | 13080 | 13841 | MCA100296 | g3192702 | 4.00E−33 | gp19 |
| 27 | 48328 | 13845 | 14246 | MCA100297 | g1046241 | 5.00E−30 | orf14 |
| 27 | 48328 | 15183 | 16646 | MCA100300 | g3192704 | e−126 | gp21 |
| 27 | 48328 | 9361 | 10777 | MCA100325 | g3192699 | 8.00E−13 | gp16 |
| 27 | 48328 | 17057 | 18226 | MCA100681 | g3294478 | 6.00E−74 | putative integrase |
| 27 | 48328 | 5343 | 5990 | MCA100784 | g15640 | 5.00E−36 | antirepressor protein |
| | | | | | | | gene (aa 1-300) |
| 27 | 48328 | 7640 | 9283 | MCA100788 | g2764873 | 9.00E−27 | gene 18.1 |
| 27 | 48328 | 10904 | 11236 | MCA100790 | | | |
| 27 | 48328 | 11341 | 11730 | MCA100791 | | | |
| 27 | 48328 | 11814 | 12479 | MCA100792 | g3192701 | 4.00E−32 | gp18 |
| 27 | 48328 | 24782 | 25846 | MCA101267 | g2105065 | 8.00E−71 | hypothetical protein |
| | | | | | | | Rv3629c |
| 27 | 48328 | 25926 | 26549 | MCA101268 | g3406829 | 5.00E−40 | glutathione-s- |
| | | | | | | | transferase homolog |
| 27 | 48328 | 26714 | 28057 | MCA101269 | g1789768 | 2.00E−93 | uroporphyrinogen III |
| | | | | | | | methylase; sirohaeme |
| | | | | | | | biosynthesis |
| 27 | 48328 | 28527 | 30197 | MCA101270 | g2565334 | e−175 | sulfite reductase |
| 27 | 48328 | 30403 | 31599 | MCA101271 | g1799660 | e−141 | aspartate |
| | | | | | | | aminotransferase (EC |
| | | | | | | | 2.6.1.1) |
| 27 | 48328 | 32136 | 32504 | MCA101273 | g1788077 | 1.00E−27 | orf, hypothetical |
| | | | | | | | protein |
| 27 | 48328 | 32871 | 34085 | MCA101274 | g451651 | e−139 | carbamoyl phosphate |
| | | | | | | | synthetase light |
| | | | | | | | subunit |
| 27 | 48328 | 34231 | 35126 | MCA101275 | g1781074 | 2.00E−41 | mrr |
| 27 | 48328 | 35218 | 35517 | MCA101276 | | | |
| 27 | 48328 | 35648 | 36154 | MCA101277 | g1573288 | 3.00E−39 | conserved hypothetical |
| | | | | | | | protein |
| 27 | 48328 | 36212 | 39451 | MCA101278 | g1750387 | 0 | carbamoylphosphate |
| | | | | | | | synthetase large |
| | | | | | | | subunit |
| 27 | 48328 | 1690 | 1878 | MCA101315 | | | |
| 27 | 48328 | 46479 | 47453 | MCA101401 | g4545243 | 3.00E−43 | unknown |
| 27 | 48328 | 14561 | 15130 | MCA101644 | g3192703 | 1.00E−17 | gp20 |
| 27 | 48328 | 47519 | 48194 | MCA101706 | g4545244 | 4.00E−34 | unknown |
| 27 | 48328 | 6600 | 6881 | MCA101849 | | | |
| 27 | 48328 | 3071 | 3532 | MCA101900 | | | |
| 27 | 48328 | 3625 | 3816 | MCA101901 | | | |
| 27 | 48328 | 2 | 349 | MCA101902 | | | |
| 28 | 49617 | 33195 | 34376 | MCA100162 | g1573560 | e−173 | elongation factor Tu |
| | | | | | | | (tufA) |
| 28 | 49617 | 34523 | 35461 | MCA100163 | g1787114 | e−103 | thioredoxin reductase |
| 28 | 49617 | 29820 | 30191 | MCA100230 | g148985 | 3.00E−59 | StrA |
| 28 | 49617 | 30315 | 30785 | MCA100231 | g1573568 | 6.00E−60 | ribosomal protein S7 |
| | | | | | | | (rpS7) |
| 28 | 49617 | 30948 | 33044 | MCA100232 | g41517 | 0 | elongation factor G |
| 28 | 49617 | 762 | 1895 | MCA100242 | g164759 | 9.00E−17 | alanine: glyoxylate |
| | | | | | | | aminotransferase |
| 28 | 49617 | 2047 | 3519 | MCA100244 | g1573675 | e−137 | aminoacyl-histidine |
| | | | | | | | dipeptidase (pepD) |
| 28 | 49617 | 3619 | 4347 | MCA100245 | g746513 | 2.00E−23 | D1022.4 |
| 28 | 49617 | 35607 | 36643 | MCA100342 | g3172117 | 5.00E−84 | acyl-CoA dehydrogenase |
| 28 | 49617 | 36644 | 37420 | MCA100343 | g2909448 | 3.00E−31 | fadE5 |
| 28 | 49617 | 37843 | 38634 | MCA100344 | g1785900 | 6.00E−30 | shikimate |
| | | | | | | | dehydrogenase |
| 28 | 49617 | 38747 | 39349 | MCA100345 | | | |
| 28 | 49617 | 39350 | 40180 | MCA100346 | g1651539 | 4.00E−07 | 4-amino-4- |
| | | | | | | | deoxychorismate lyase. |
| 28 | 49617 | 14395 | 17115 | MCA100440 | g3414697 | 0 | lactoferrin binding |
| | | | | | | | protein B; LbpB |
| 28 | 49617 | 22514 | 23227 | MCA100449 | g3414695 | e−135 | unknown |
| 28 | 49617 | 40373 | 41422 | MCA100670 | g1573431 | 3.00E−63 | conserved hypothetical |
| | | | | | | | protein |
| 28 | 49617 | 41438 | 42034 | MCA100671 | g3328593 | 2.00E−29 | Thymidylate Kinase |
| 28 | 49617 | 42254 | 43129 | MCA100672 | g1573221 | 4.00E−76 | dihydrodipicolinate |
| | | | | | | | synthetase (dapA) |
| 28 | 49617 | 43531 | 44238 | MCA100673 | g1788820 | 1.00E−80 | phosphoribosylaminoimi |
| | | | | | | | dazolesuccinocarboxamide |
| | | | | | | | de synthetase |
| 28 | 49617 | 44287 | 44583 | MCA100674 | g1261932 | 2.00E−22 | hypothetical protein |
| | | | | | | | Rv2230c |
| 28 | 49617 | 44964 | 46457 | MCA100675 | g38754 | e−161 | anthranilate synthase |
| 28 | 49617 | 47871 | 48461 | MCA100677 | g1420585 | 9.00E−23 | ORF YOR259c |
| 28 | 49617 | 4561 | 4887 | MCA100806 | g4062758 | 6.00E−28 | Hypothetical protein |
| | | | | | | | HI1355 |
| 28 | 49617 | 5171 | 5995 | MCA100807 | g1778577 | 5.00E−38 | similar to H. |
| | | | | | | | influenzae |
| 28 | 49617 | 7002 | 7334 | MCA100810 | g536952 | 1.00E−32 | phnA gene product |
| 28 | 49617 | 7401 | 8669 | MCA100811 | g557262 | e−141 | glutamate 1- |
| | | | | | | | semialdehyde 2,1- |
| | | | | | | | aminomutase |
| 28 | 49617 | 8987 | 11776 | MCA100812 | g1786287 | 0 | preprotein |
| | | | | | | | translocase; secretion |
| | | | | | | | protein |
| 28 | 49617 | 11952 | 12248 | MCA100813 | | | |
| 28 | 49617 | 12453 | 13913 | MCA100961 | g4033729 | 2.00E−92 | apolipoprotein N- |
| | | | | | | | acyltransferase |
| 28 | 49617 | 17302 | 20301 | MCA101127 | g3414688 | 0 | lactoferrin binding |
| | | | | | | | protein A; LbpA |
| 28 | 49617 | 22158 | 22340 | MCA101129 | | | |
| 28 | 49617 | 23390 | 24286 | MCA101130 | g3861035 | 4.00E−53 | unknown |
| 28 | 49617 | 24341 | 25198 | MCA101131 | g154231 | 2.00E−57 | p-aminobenzoate |
| | | | | | | | synthase component I |
| 28 | 49617 | 25891 | 27114 | MCA101133 | g2384564 | e−115 | beta-ketoacyl-ACP |
| | | | | | | | synthase I |
| 28 | 49617 | 43166 | 43477 | MCA101765 | | | |
| 28 | 49617 | 27638 | 28825 | MCA101786 | g3924824 | 3.00E−18 | cDNA ESTs D37429, |
| | | | | | | | D34381, yk370a12.5, |
| | | | | | | | and yk370a12.3 |
| 28 | 49617 | 20306 | 21928 | MCA101788 | g3414689 | 0 | unknown |
| 28 | 49617 | 6260 | 6820 | MCA101859 | g887848 | 3.00E−16 | ORF_o326 |
| 28 | 49617 | 237 | 524 | MCA101905 | | | |
| 29 | 66986 | 35441 | 38304 | MCA100016 | g154417 | 0 | DNA repair enzyme |
| 29 | 66986 | 59667 | 60365 | MCA100045 | g1770057 | 3.00E−25 | glutamate racemase |
| 29 | 66986 | 26527 | 27261 | MCA100088 | g551827 | 1.00E−50 | phosphatidylserine |
| | | | | | | | decarboxylase |
| 29 | 66986 | 62551 | 62976 | MCA100100 | g2621609 | 3.00E−35 | peptide methionine |
| | | | | | | | sulfoxide reductase |
| 29 | 66986 | 32810 | 33283 | MCA100164 | g1871177 | 1.00E−32 | unknown protein |
| 29 | 66986 | 32188 | 32637 | MCA100165 | g1790320 | 4.00E−29 | orf, hypothetical |
| | | | | | | | protein |
| 29 | 66986 | 31513 | 32049 | MCA100166 | g1574395 | 2.00E−41 | dethiobiotin synthase |
| | | | | | | | (bioD-2) |
| 29 | 66986 | 30641 | 31438 | MCA100167 | g1574396 | 2.00E−26 | biotin synthesis |
| | | | | | | | protein, putative |
| 29 | 66986 | 3760 | 4908 | MCA100170 | g150277 | e−144 | major anaerobically |
| | | | | | | | induced outer membrane |
| | | | | | | | protein |
| 29 | 66986 | 7578 | 8528 | MCA100196 | g1788007 | e−108 | phenylalanine tRNA |
| | | | | | | | synthetase, alpha- |
| | | | | | | | subunit |
| 29 | 66986 | 8587 | 10980 | MCA100197 | g1788006 | 0 | phenylalanine tRNA |
| | | | | | | | synthetase, beta- |
| | | | | | | | subunit |
| 29 | 66986 | 376 | 2616 | MCA100310 | g2584871 | 0 | nitric oxide reductase |
| 29 | 66986 | 63073 | 63813 | MCA100362 | g1573289 | 6.00E−48 | conserved hypothetical |
| | | | | | | | protein |
| 29 | 66986 | 63968 | 64921 | MCA100363 | g1736517 | 2.00E−86 | ORF_ID: o337#12; |
| | | | | | | | similar to [P44167] |
| 29 | 66986 | 65011 | 65925 | MCA100364 | g1788268 | 2.00E−60 | orf, hypothetical |
| | | | | | | | protein |
| 29 | 66986 | 27579 | 27932 | MCA100376 | g1773150 | 3.00E−10 | hypothetical 14.8 kd |
| | | | | | | | protein |
| 29 | 66986 | 28126 | 29346 | MCA100377 | g1574398 | e−134 | adenosylmethionine-8- |
| | | | | | | | amino-7-oxononanoate |
| | | | | | | | aminotransfer |
| 29 | 66986 | 29451 | 30593 | MCA100378 | g1574397 | 3.00E−94 | 8-amino-7-oxononanoate |
| | | | | | | | synthase (bioF) |
| 29 | 66986 | 38453 | 38947 | MCA100569 | g1573216 | 3.00E−41 | single-stranded DNA |
| | | | | | | | binding protein (ssb) |
| 29 | 66986 | 41258 | 41935 | MCA100572 | g1067166 | 3.00E−67 | inner membrane protein |
| 29 | 66986 | 6768 | 7145 | MCA100655 | g2983502 | 3.00E−12 | hypothetical protein |
| 29 | 66986 | 56916 | 58574 | MCA100693 | g1842057 | 0 | electron transfer |
| | | | | | | | flavoprotein- |
| | | | | | | | ubiquinone |
| | | | | | | | oxidoreductase |
| 29 | 66986 | 55454 | 56770 | MCA100694 | g1787461 | 5.00E−88 | enzyme in alternate |
| | | | | | | | path of synthesis of |
| | | | | | | | 5-aminolevulin |
| 29 | 66986 | 53509 | 54726 | MCA100696 | g557259 | 1.00E−18 | orf3 |
| 29 | 66986 | 5678 | 6376 | MCA100697 | g1806180 | 4.00E−13 | hypothetical protein |
| | | | | | | | Rv0712 |
| 29 | 66986 | 52515 | 52949 | MCA100698 | g557258 | 3.00E−09 | hemM |
| 29 | 66986 | 51719 | 52480 | MCA100699 | g968927 | 9.00E−37 | orfY gene product |
| 29 | 66986 | 50111 | 51057 | MCA100701 | g147379 | e−122 | phosphoribosylpyrophosphate |
| | | | | | | | synthetase (EC |
| | | | | | | | 2.7.6.1) |
| 29 | 66986 | 49534 | 50058 | MCA100957 | g4062631 | 1.00E−11 | Cytochrome b561 |
| 29 | 66986 | 23587 | 25704 | MCA100973 | g939724 | 2.00E−99 | putative sensor |
| | | | | | | | kinase; regulatory |
| | | | | | | | protein |
| 29 | 66986 | 21832 | 22698 | MCA100974 | g581757 | e−110 | cysteine synthase |
| 29 | 66986 | 21122 | 21790 | MCA100975 | g4155184 | 9.00E−19 | putative |
| 29 | 66986 | 19031 | 20455 | MCA100977 | g1789148 | 5.00E−69 | putative enzyme |
| 29 | 66986 | 17277 | 18389 | MCA100979 | g1573195 | 1.00E−82 | ATP-dependent RNA |
| | | | | | | | helicase (deaD) |
| 29 | 66986 | 14191 | 16212 | MCA100981 | g1789147 | e−144 | (p)ppGpp synthetase I |
| | | | | | | | (GTP |
| | | | | | | | pyrophosphokinase) |
| 29 | 66986 | 13280 | 14149 | MCA100982 | g466773 | 2.00E−57 | formamidopyrimidine- |
| | | | | | | | DNA glycosylase |
| 29 | 66986 | 11637 | 11894 | MCA100984 | g1657496 | 1.00E−21 | hypothetical protein |
| 29 | 66986 | 61385 | 62110 | MCA101336 | g3132253 | 1.00E−33 | ORF5 |
| 29 | 66986 | 11131 | 11412 | MCA101783 | g1435199 | 3.00E−26 | IhfA |
| 29 | 66986 | 49142 | 49360 | MCA101787 | | | |
| 29 | 66986 | 60620 | 60838 | MCA101791 | | | |
| 29 | 66986 | 41962 | 42651 | MCA101800 | g1174236 | 8.00E−30 | CycJ |
| 29 | 66986 | 47425 | 48129 | MCA101884 | g467327 | 9.00E−49 | unknown |
| 29 | 66986 | 33583 | 33888 | MCA101885 | g1196481 | 4.00E−10 | unknown protein |
| 29 | 66986 | 34239 | 34529 | MCA101888 | g1778554 | 3.00E−20 | HI0034 homolog |
| 29 | 66986 | 34824 | 35239 | MCA101893 | g1303791 | 7.00E−15 | YqeJ |
| 29 | 66986 | 2840 | 3361 | MCA101894 | g2633273 | 1.00E−30 | similar to |
| | | | | | | | hypothetical proteins |
| 29 | 66986 | 39252 | 40400 | MCA101895 | g1789416 | 7.00E−91 | putative |
| | | | | | | | synthetase/amidase |
| 29 | 66986 | 42814 | 43641 | MCA101896 | g150508 | e−103 | lipoprotein |
| 29 | 66986 | 43836 | 44480 | MCA101897 | g1552774 | 1.00E−37 | hypothetical |
| 29 | 66986 | 44515 | 45558 | MCA101898 | g1573615 | e−121 | ABC transporter, ATP- |
| | | | | | | | binding protein |
| 29 | 66986 | 45781 | 46777 | MCA101899 | g2072712 | 9.00E−14 | mtrB |
| 29 | 66986 | 58939 | 59568 | MCA102050 | | | |
| 29 | 66986 | 20802 | 21026 | MCA102051 | | | |
| 29 | 66986 | 12225 | 13193 | MCA102055 | | | |
| 30 | 58909 | 57032 | 58390 | MCA100109 | g4062412 | e−165 | Hypothet. 51.7 kd |
| | | | | | | | protein in dnaJ-rpsU |
| | | | | | | | interegenic region. |
| 30 | 58909 | 44550 | 45806 | MCA100235 | g1799634 | 2.00E−97 | NADH dehydrogenase I |
| | | | | | | | chain N (EC 1.6.5.3) |
| 30 | 58909 | 47991 | 49715 | MCA100331 | g1574424 | 0 | arginyl-tRNA |
| | | | | | | | synthetase (argS) |
| 30 | 58909 | 46973 | 47773 | MCA100332 | g290446 | 4.00E−31 | ferredoxin NADP+ |
| | | | | | | | reductase |
| 30 | 58909 | 1064 | 2329 | MCA100463 | g436156 | e−127 | GTPase required for |
| | | | | | | | high frequency |
| | | | | | | | lysogenization |
| 30 | 58909 | 2502 | 3320 | MCA100464 | g606115 | 5.00E−55 | dihydropteroate |
| | | | | | | | synthase |
| 30 | 58909 | 3369 | 4094 | MCA100465 | g1789315 | 4.00E−34 | orf, hypothetical |
| | | | | | | | protein |
| 30 | 58909 | 56014 | 56754 | MCA100615 | g1183839 | 8.00E−73 | unknown |
| 30 | 58909 | 54292 | 55815 | MCA100616 | g148179 | e−131 | threonine deaminase |
| 30 | 58909 | 53064 | 54086 | MCA100617 | g44888 | e−153 | NgoPII restriction and |
| | | | | | | | modification |
| 30 | 58909 | 52624 | 53001 | MCA100618 | g606334 | 1.00E−30 | ORF_o133 |
| 30 | 58909 | 52190 | 52600 | MCA100619 | g1147812 | 1.00E−23 | red cell-type low |
| | | | | | | | molecular weight acid |
| | | | | | | | phosphatase |
| 30 | 58909 | 51008 | 52030 | MCA100620 | g145431 | 4.00E−49 | unidentified reading |
| | | | | | | | frame II |
| 30 | 58909 | 4392 | 5996 | MCA100757 | g44839 | e−139 | pilB gene product (AA |
| | | | | | | | 1-521) |
| 30 | 58909 | 45970 | 46683 | MCA100785 | g1573561 | 5.00E−96 | membrane protein |
| 30 | 58909 | 6 | 854 | MCA100838 | g1573723 | 7.00E−63 | heat shock protein |
| | | | | | | | (htpX) |
| 30 | 58909 | 39210 | 39746 | MCA101072 | g1788617 | 2.00E−81 | NADH dehydrogenase I |
| | | | | | | | chain I |
| 30 | 58909 | 39794 | 40300 | MCA101079 | g1788616 | 2.00E−32 | NADH dehydrogenase I |
| | | | | | | | chain J |
| 30 | 58909 | 6340 | 7718 | MCA101157 | g2804454 | e−131 | C. elegans |
| | | | | | | | adenosylhomocysteinase |
| | | | | | | | (SW: P27604) |
| 30 | 58909 | 8333 | 11554 | MCA101159 | g3523135 | 0 | transferrin binding |
| | | | | | | | protein A; TbpA |
| 30 | 58909 | 12590 | 14125 | MCA101161 | g3523128 | 0 | unknown |
| 30 | 58909 | 14403 | 16520 | MCA101164 | g3523129 | 0 | transferrin binding |
| | | | | | | | protein B; TbpB |
| 30 | 58909 | 17432 | 18442 | MCA101166 | g1590923 | 8.00E−21 | conserved hypothetical |
| | | | | | | | protein |
| 30 | 58909 | 18722 | 19336 | MCA101167 | g3861219 | 9.00E−47 | unknown |
| 30 | 58909 | 19375 | 20268 | MCA101168 | g1651962 | 3.00E−80 | hypothetical protein |
| 30 | 58909 | 22343 | 23683 | MCA101170 | g1574303 | e−128 | mrsA protein (mrsA) |
| 30 | 58909 | 23858 | 24490 | MCA101194 | g1653389 | 9.00E−50 | pyridoxamine 5- |
| | | | | | | | phosphate oxidase |
| 30 | 58909 | 24814 | 25410 | MCA101195 | g4063381 | 3.00E−27 | periplasmic chaperone |
| | | | | | | | protein |
| 30 | 58909 | 25438 | 25635 | MCA101196 | g1573260 | 3.00E−08 | mercuric ion scavenger |
| | | | | | | | protein (merP) |
| 30 | 58909 | 25824 | 26192 | MCA101197 | g3273735 | 2.00E−32 | NADH dehydrogenase |
| | | | | | | | chain A |
| 30 | 58909 | 26785 | 27447 | MCA101199 | g1788624 | 6.00E−87 | NADH dehydrogenase I |
| | | | | | | | chain B |
| 30 | 58909 | 27619 | 29301 | MCA101200 | g1788622 | 0 | NADH dehydrogenase I |
| | | | | | | | chain C, D |
| 30 | 58909 | 30568 | 31590 | MCA101202 | g682765 | 3.00E−74 | mccB |
| 30 | 58909 | 31965 | 32180 | MCA101203 | g349635 | 2.00E−19 | NADH dehydrogenase |
| | | | | | | | subunit |
| 30 | 58909 | 33192 | 33647 | MCA101205 | g349636 | 3.00E−46 | NADH dehydrogenase |
| | | | | | | | subunit |
| 30 | 58909 | 33770 | 35029 | MCA101206 | g1799645 | e−152 | NADH dehydrogenase I |
| | | | | | | | chain F (EC 1.6.5.3) |
| 30 | 58909 | 35070 | 38009 | MCA101207 | g409013 | 0 | NADH dehydrogenase |
| | | | | | | | subunit |
| 30 | 58909 | 38202 | 39188 | MCA101208 | g1788618 | e−123 | NADH dehydrogenase I |
| | | | | | | | chain H |
| 30 | 58909 | 40440 | 40736 | MCA101211 | g1799639 | 4.00E−22 | NADH dehydrogenase I |
| | | | | | | | chain K (EC 1.6.5.3) |
| 30 | 58909 | 40746 | 42596 | MCA101212 | g1788614 | 0 | NADH dehydrogenase I |
| | | | | | | | chain L |
| 30 | 58909 | 42622 | 44157 | MCA101213 | g1799637 | e−148 | NADH dehydrogenase |
| | | | | | | | chain 4 (EC 1.6.5.3) |
| 30 | 58909 | 32262 | 33029 | MCA101966 | | | |
| 31 | 65792 | 57101 | 58057 | MCA100214 | g1236631 | 2.00E−69 | SfhB |
| 31 | 65792 | 58173 | 58838 | MCA100215 | g2104329 | 5.00E−19 | yfiH |
| 31 | 65792 | 58955 | 59695 | MCA100216 | g1573058 | 1.00E−62 | conserved hypothetical |
| | | | | | | | protein |
| 31 | 65792 | 31449 | 32228 | MCA100281 | g4008034 | 3.00E−82 | enoyl-(acyl-carrier |
| | | | | | | | protein) reductase |
| 31 | 65792 | 32373 | 33071 | MCA100282 | g1573553 | 3.00E−91 | ribulose-phosphate 3- |
| | | | | | | | epimerase (dod) |
| 31 | 65792 | 33430 | 33732 | MCA100283 | | | |
| 31 | 65792 | 33788 | 34507 | MCA100284 | | | |
| 31 | 65792 | 34613 | 35137 | MCA100286 | g2959334 | 8.00E−17 | hypothetical protein |
| 31 | 65792 | 44547 | 46088 | MCA100350 | g1790041 | e−153 | 2,3- |
| | | | | | | | bisphosphoglycerate- |
| | | | | | | | indpndnt |
| | | | | | | | phosphoglycerate |
| | | | | | | | mutase |
| 31 | 65792 | 46329 | 47333 | MCA100351 | g2983365 | 2.00E−42 | carboxyl-terminal |
| | | | | | | | protease |
| 31 | 65792 | 59939 | 62041 | MCA100406 | g1573258 | e−178 | potassium/copper- |
| | | | | | | | transporting ATPase, |
| | | | | | | | putative |
| 31 | 65792 | 62189 | 62968 | MCA100407 | | | |
| 31 | 65792 | 63137 | 63424 | MCA100408 | g1787108 | 7.00E−14 | orf, hypothetical |
| | | | | | | | protein |
| 31 | 65792 | 63494 | 65749 | MCA100409 | g45972 | 0 | URF 2 |
| 31 | 65792 | 342 | 1250 | MCA100493 | g1787799 | 6.00E−40 | orf, hypothetical |
| | | | | | | | protein |
| 31 | 65792 | 5366 | 7711 | MCA100687 | g42481 | 0 | pyruvate, water |
| | | | | | | | dikinase |
| 31 | 65792 | 8122 | 8934 | MCA100688 | g1001627 | 5.00E−16 | hypothetical protein |
| 31 | 65792 | 9194 | 11455 | MCA100689 | g4062515 | e−117 | Hypothetical protein |
| | | | | | | | HI0115 |
| 31 | 65792 | 12030 | 12881 | MCA100691 | g1787606 | 5.00E−96 | orf, hypothetical |
| | | | | | | | protein |
| 31 | 65792 | 35380 | 36765 | MCA100702 | g4155857 | e−162 | fumerase |
| 31 | 65792 | 37101 | 40302 | MCA100703 | g3928723 | 4.00E−77 | putative ABC |
| | | | | | | | transporter |
| 31 | 65792 | 41558 | 41968 | MCA100706 | g4154631 | 1.00E−26 | bacterioferritin |
| | | | | | | | comigratory protein |
| 31 | 65792 | 42310 | 43617 | MCA100707 | g1573080 | 0 | conserved hypothetical |
| | | | | | | | protein |
| 31 | 65792 | 13827 | 14018 | MCA100733 | g1778825 | 7.00E−21 | major cold shock |
| | | | | | | | protein CspA |
| 31 | 65792 | 33077 | 33430 | MCA100775 | | | |
| 31 | 65792 | 47450 | 48073 | MCA100793 | g3142729 | 2.00E−62 | response regulator |
| 31 | 65792 | 48273 | 48530 | MCA100794 | g2632000 | 3.00E−22 | RpsT protein |
| 31 | 65792 | 48820 | 49518 | MCA100795 | g1203935 | 7.00E−08 | coded for by C. |
| | | | | | | | elegans cDNA yk86b10.5 |
| 31 | 65792 | 49766 | 52474 | MCA100796 | g525202 | 0 | DNA topoisomerase |
| | | | | | | | (ATP-hydrolysing) |
| 31 | 65792 | 52499 | 53179 | MCA100797 | g557844 | 5.00E−19 | orf, len: 234, CAI: |
| | | | | | | | 0.26 |
| 31 | 65792 | 53919 | 55553 | MCA100799 | g882589 | 4.00E−61 | CG Site No. 847; |
| | | | | | | | alternate gen name |
| | | | | | | | dnaP, parB |
| 31 | 65792 | 55986 | 56600 | MCA100800 | g1573134 | 6.00E−31 | lipoprotein, putative |
| 31 | 65792 | 30651 | 31190 | MCA100907 | g2981082 | 1.00E−51 | GTP-cyclohydrolase |
| 31 | 65792 | 28838 | 30289 | MCA100908 | g4062623 | 5.00E−91 | Novobiocin resistance- |
| | | | | | | | related protein Nov |
| 31 | 65792 | 27100 | 28536 | MCA100909 | g2894397 | 6.00E−25 | TphA protein |
| 31 | 65792 | 26354 | 26986 | MCA100911 | g2708657 | 3.00E−57 | ribose-5-phosphate |
| | | | | | | | isomerase |
| 31 | 65792 | 25195 | 26139 | MCA100912 | g1787100 | 3.00E−43 | putative surface |
| | | | | | | | protein |
| 31 | 65792 | 23910 | 25004 | MCA100913 | g1789273 | 4.00E−39 | orf, hypothetical |
| | | | | | | | protein |
| 31 | 65792 | 22262 | 23656 | MCA100914 | g142309 | e−179 | glutamine synthetase |
| 31 | 65792 | 53226 | 53429 | MCA101798 | | | |
| 31 | 65792 | 21511 | 21816 | MCA101835 | | | |
| 31 | 65792 | 17390 | 18373 | MCA101836 | g1653422 | 2.00E−06 | hypothetical protein |
| 31 | 65792 | 20955 | 21458 | MCA101838 | | | |
| 31 | 65792 | 1604 | 2059 | MCA101861 | g2688497 | 7.00E−13 | carboxypeptidase, |
| | | | | | | | putative |
| 31 | 65792 | 2444 | 3820 | MCA101862 | g1907384 | e−160 | soluble pyridine |
| | | | | | | | nucleotide |
| | | | | | | | transhydrogenase |
| 31 | 65792 | 4190 | 4996 | MCA101866 | g1787995 | 2.00E−61 | orf, hypothetical |
| | | | | | | | protein |
| 31 | 65792 | 14240 | 16021 | MCA101867 | g1651441 | e−107 | MsbA protein. |
| 31 | 65792 | 18490 | 19170 | MCA101868 | g561691 | 5.00E−40 | LpsA |
| 31 | 65792 | 19197 | 19931 | MCA101873 | g1573652 | 1.00E−55 | lipopolysaccharide |
| | | | | | | | biosynthesis protein |
| 31 | 65792 | 19998 | 20750 | MCA101874 | g1573652 | 4.00E−56 | lipopolysaccharide |
| | | | | | | | biosynthesis protein |
| 31 | 65792 | 13103 | 13522 | MCA101875 | g3062 | 4.00E−41 | 3-dehydroquinate |
| | | | | | | | dehydratase |
| 32 | 62909 | 50745 | 52567 | MCA100340 | g2623969 | 2.00E−56 | putative peptidyl- |
| | | | | | | | prolyl cis-trans |
| | | | | | | | isomerase |
| 32 | 62909 | 49000 | 50580 | MCA100341 | g42595 | 0 | purH gene product |
| 32 | 62909 | 42928 | 48531 | MCA100348 | g1666683 | 1.00E−45 | hsf gene product |
| 32 | 62909 | 8351 | 8881 | MCA100498 | g1574570 | 2.00E−61 | conserved hypothetical |
| | | | | | | | protein |
| 32 | 62909 | 10103 | 11257 | MCA100501 | g1789311 | e−157 | methionine |
| | | | | | | | adenosyltransferase 1 |
| 32 | 62909 | 11895 | 12551 | MCA100503 | g4062689 | 1.00E−56 | heterocyst maturation |
| | | | | | | | protein (devA) homolog |
| 32 | 62909 | 12581 | 13813 | MCA100504 | g1787362 | 2.00E−62 | putative kinase |
| 32 | 62909 | 6566 | 7315 | MCA100649 | g1773205 | 2.00E−22 | similar to H. |
| | | | | | | | influenzae HI0735 |
| 32 | 62909 | 6025 | 6510 | MCA100650 | g1786736 | 1.00E−52 | peptidyl-prolyl cis- |
| | | | | | | | trans isomerase B |
| | | | | | | | (rotamase B) |
| 32 | 62909 | 4072 | 5826 | MCA100651 | g1574816 | e−175 | glutaminyl-tRNA |
| | | | | | | | synthetase (glnS) |
| 32 | 62909 | 2634 | 3977 | MCA100652 | g3850110 | 3.00E−60 | rrm3-pif1 helicase |
| | | | | | | | homolog |
| 32 | 62909 | 1016 | 2038 | MCA100654 | g39921 | 3.00E−75 | glyceraldehyde-3- |
| | | | | | | | phosphate |
| | | | | | | | dehydrogenase (AA 1-335) |
| 32 | 62909 | 54353 | 54796 | MCA100831 | g1573349 | 3.00E−38 | conserved hypothetical |
| | | | | | | | protein |
| 32 | 62909 | 54874 | 56076 | MCA100832 | g1788879 | e−169 | putative |
| | | | | | | | aminotransferase |
| 32 | 62909 | 56256 | 56636 | MCA100833 | g1788878 | 3.00E−55 | orf, hypothetical |
| | | | | | | | protein |
| 32 | 62909 | 56752 | 57066 | MCA100834 | g1573345 | 2.00E−30 | conserved hypothetical |
| | | | | | | | protein |
| 32 | 62909 | 57767 | 59620 | MCA100836 | g1573342 | e−135 | heat shock protein |
| | | | | | | | (hscA) |
| 32 | 62909 | 59732 | 60067 | MCA100837 | g3925514 | 6.00E−39 | ferredoxin |
| 32 | 62909 | 60693 | 62453 | MCA100839 | g3261657 | 3.00E−97 | ggtB |
| 32 | 62909 | 57114 | 57557 | MCA100980 | g1799935 | 4.00E−17 | similar to [P36540] |
| 32 | 62909 | 14126 | 14635 | MCA101066 | | | |
| 32 | 62909 | 17539 | 17940 | MCA101071 | g2114470 | 5.00E−46 | transposase homolog A |
| 32 | 62909 | 21605 | 22480 | MCA101075 | g1788819 | 2.00E−68 | orf, hypothetical |
| | | | | | | | protein |
| 32 | 62909 | 22570 | 23385 | MCA101076 | g1001366 | 7.00E−39 | hypothetical protein |
| 32 | 62909 | 26086 | 26817 | MCA101080 | g2367307 | 7.00E−95 | |
| 32 | 62909 | 27509 | 29122 | MCA101082 | g2367309 | 5.00E−89 | orf, hypothetical |
| | | | | | | | protein |
| 32 | 62909 | 29170 | 29628 | MCA101083 | g1653085 | 8.00E−26 | adenine |
| | | | | | | | phosphoribosyltransferase |
| 32 | 62909 | 53480 | 54157 | MCA101204 | | | |
| 32 | 62909 | 31514 | 32173 | MCA101329 | g1110441 | 2.00E−27 | hypothetical product |
| 32 | 62909 | 32281 | 34587 | MCA101330 | g290642 | 2.00E−80 | ATPase |
| 32 | 62909 | 35413 | 37533 | MCA101332 | g1574581 | e−127 | penicillin-binding |
| | | | | | | | protein 1B (ponB) |
| 32 | 62909 | 40898 | 41815 | MCA101337 | g2367208 | 1.00E−56 | methylase for 50S |
| | | | | | | | ribosomal subunit |
| | | | | | | | protein L11 |
| 32 | 62909 | 41865 | 42068 | MCA101338 | g2773316 | 2.00E−12 | small DNA binding |
| | | | | | | | protein Fis |
| 32 | 62909 | 62692 | 62907 | MCA101380 | g2407233 | 5.00E−23 | similar to Haemophilus |
| | | | | | | | influenzae U32796 |
| 32 | 62909 | 52735 | 53004 | MCA101444 | g535709 | 5.00E−26 | HU protein |
| 32 | 62909 | 19635 | 20612 | MCA101773 | | | |
| 32 | 62909 | 26826 | 27470 | MCA101776 | | | |
| 32 | 62909 | 29954 | 30133 | MCA101904 | g1788076 | 5.00E−10 | orf, hypothetical |
| | | | | | | | protein |
| 32 | 62909 | 30170 | 31093 | MCA101910 | g1800020 | 1.00E−54 | similar to [P37768] |
| 32 | 62909 | 39861 | 40532 | MCA101911 | g48895 | 9.00E−10 | acid phosphatase |
| 32 | 62909 | 15209 | 16036 | MCA101913 | g2649017 | 2.00E−16 | conserved hypothetical |
| | | | | | | | protein |
| 32 | 62909 | 16414 | 17027 | MCA101914 | g1652952 | 5.00E−30 | transposase |
| 32 | 62909 | 20712 | 21326 | MCA101917 | g244501 | 5.00E−42 | esterase |
| | | | | | | | II = carboxylesterase |
| | | | | | | | {EC 3.1.1.1} |
| 32 | 62909 | 24945 | 25550 | MCA101919 | g2407235 | 3.00E−81 | manganese superoxide |
| | | | | | | | dismutase |
| 32 | 62909 | 9114 | 9776 | MCA102048 | g1001410 | 1.00E−07 | hypothetical protein |
| 32 | 62909 | 11483 | 11827 | MCA102049 | | | |
| 33 | 63563 | 62405 | 62632 | MCA101035 | g2314031 | 5.00E−10 | conserved hypothetical |
| | | | | | | | protein |
| 33 | 63563 | 56948 | 58870 | MCA101040 | g2623258 | 4.00E−45 | putative secreted |
| | | | | | | | protein |
| 33 | 63563 | 21766 | 23691 | MCA101136 | g2765451 | 8.00E−61 | nitrate/nitrite |
| | | | | | | | sensory protein |
| 33 | 63563 | 3 | 827 | MCA101560 | g2098763 | 7.00E−67 | ThiI |
| 33 | 63563 | 31681 | 31896 | MCA101587 | g39312 | 3.00E−08 | barstar (AA 1-90) |
| 33 | 63563 | 1409 | 2644 | MCA101680 | g1684734 | 3.00E−41 | ORF396 protein |
| 33 | 63563 | 3749 | 4354 | MCA101682 | g1786318 | 2.00E−61 | putative carbonic |
| | | | | | | | anhdrase (EC 4.2.1.1) |
| 33 | 63563 | 4569 | 8282 | MCA101683 | g1911243 | 0 | alpha-subunit of |
| | | | | | | | nitrate reductase |
| 33 | 63563 | 8347 | 9879 | MCA101684 | g2765455 | 0 | respiratory nitrate |
| | | | | | | | reductase beta subunit |
| 33 | 63563 | 9907 | 10644 | MCA101685 | g2765456 | 1.00E−40 | putative chaperone |
| 33 | 63563 | 10719 | 11384 | MCA101686 | g2765457 | 2.00E−63 | respiratory nitrate |
| | | | | | | | reductase gamma |
| | | | | | | | subunit |
| 33 | 63563 | 11872 | 12597 | MCA101688 | g2765458 | 6.00E−39 | NifM protein |
| 33 | 63563 | 12741 | 13922 | MCA101689 | g1574287 | 9.00E−70 | molybdopterin |
| | | | | | | | biosynthesis protein |
| | | | | | | | (moeA) |
| 33 | 63563 | 13931 | 15273 | MCA101690 | g1574545 | 4.00E−46 | molybdenum ABC |
| | | | | | | | transporter, permease |
| | | | | | | | protein (modB) |
| 33 | 63563 | 15349 | 16047 | MCA101691 | g973214 | 2.00E−49 | ModA |
| 33 | 63563 | 16157 | 16573 | MCA101692 | g899221 | 1.00E−26 | potential molybdenum- |
| | | | | | | | pterin-binding-protein |
| 33 | 63563 | 16659 | 17036 | MCA101693 | g1001213 | 1.00E−26 | molybdopterin (MPT) |
| | | | | | | | converting factor, |
| | | | | | | | subunit 2 |
| 33 | 63563 | 17122 | 17355 | MCA101694 | g1673309 | 1.00E−09 | hypothetical protein |
| 33 | 63563 | 17375 | 17827 | MCA101695 | g4185548 | 2.00E−27 | molybdenum cofactor |
| | | | | | | | biosynthesis protein C |
| 33 | 63563 | 18520 | 19008 | MCA101697 | g42009 | 2.00E−50 | moaB |
| 33 | 63563 | 19257 | 19745 | MCA101698 | g1790345 | 5.00E−20 | orf, hypothetical |
| | | | | | | | protein |
| 33 | 63563 | 19849 | 20817 | MCA101699 | g1574526 | 1.00E−73 | molybdenum cofactor |
| | | | | | | | biosynthesis protein A |
| | | | | | | | (moaA) |
| 33 | 63563 | 21099 | 21722 | MCA101700 | g2765450 | 1.00E−57 | nitrate/nitrite |
| | | | | | | | regulatory protein |
| 33 | 63563 | 24027 | 25301 | MCA101702 | g2765452 | e−100 | nitrate extrusion |
| | | | | | | | protein |
| 33 | 63563 | 25322 | 26662 | MCA101703 | g2765453 | e−131 | nitrate extrusion |
| | | | | | | | protein |
| 33 | 63563 | 26767 | 27003 | MCA101704 | g43593 | 7.00E−25 | IS1016-V6 |
| 33 | 63563 | 27101 | 27838 | MCA101705 | g1256835 | 2.00E−37 | moeB gene product |
| 33 | 63563 | 30824 | 31012 | MCA101707 | g39312 | 6.00E−08 | barstar (AA 1-90) |
| 33 | 63563 | 31908 | 32282 | MCA101708 | g532528 | 5.00E−15 | ribonuclease precursor |
| 33 | 63563 | 44513 | 44764 | MCA101912 | | | |
| 33 | 63563 | 59342 | 60850 | MCA101915 | g1772622 | 3.00E−30 | HecB |
| 33 | 63563 | 63286 | 63563 | MCA101916 | | | |
| 34 | 89047 | 54807 | 56590 | MCA100174 | g2984323 | 4.00E−67 | hypothetical protein |
| 34 | 89047 | 72751 | 73173 | MCA100188 | g1788522 | 2.00E−25 | possible subunit of |
| | | | | | | | heme lyase |
| 34 | 89047 | 64432 | 65214 | MCA100272 | g1799711 | 8.00E−72 | pseudouridylate |
| | | | | | | | synthase I (EC |
| | | | | | | | 4.2.1.70) |
| 34 | 89047 | 64078 | 64287 | MCA100273 | g142459 | 7.00E−25 | initiation factor 1 |
| 34 | 89047 | 16260 | 18866 | MCA100326 | g1651269 | 0 | Leucine-tRNA ligase |
| | | | | | | | (EC 6.1.1.4). |
| 34 | 89047 | 67834 | 68322 | MCA100327 | g1573775 | 6.00E−27 | conserved hypothetical |
| | | | | | | | protein |
| 34 | 89047 | 68604 | 69926 | MCA100329 | | | |
| 34 | 89047 | 70103 | 72067 | MCA100330 | g1174237 | e−175 | CycK |
| 34 | 89047 | 8218 | 9123 | MCA100410 | g1420863 | e−140 | oligopeptidepermease |
| 34 | 89047 | 9349 | 11319 | MCA100411 | g1420859 | 0 | oligopeptidepermease |
| 34 | 89047 | 11462 | 11734 | MCA100412 | g1817528 | 7.00E−13 | component protein of |
| | | | | | | | adhesin complex |
| 34 | 89047 | 12117 | 12434 | MCA100413 | g1817528 | 1.00E−14 | component protein of |
| | | | | | | | adhesin complex |
| 34 | 89047 | 31288 | 32337 | MCA100432 | g3212213 | e−120 | H. influenzae |
| | | | | | | | predicted coding |
| | | | | | | | region HI1126.1 |
| 34 | 89047 | 30886 | 31281 | MCA100623 | g3212214 | 8.00E−48 | H. influenzae |
| | | | | | | | predicted coding |
| | | | | | | | region HI1127 |
| 34 | 89047 | 3573 | 4214 | MCA100666 | g1573906 | 6.00E−96 | H. influenzae |
| | | | | | | | predicted coding |
| | | | | | | | region HI0882 |
| 34 | 89047 | 4621 | 6105 | MCA100667 | g1420860 | 0 | oligopeptidepermease |
| 34 | 89047 | 6109 | 7032 | MCA100668 | g1420861 | e−145 | oligopeptidepermease |
| 34 | 89047 | 7081 | 8115 | MCA100669 | g1420862 | e−163 | oligopeptidepermease |
| 34 | 89047 | 26541 | 28064 | MCA100734 | g2984319 | 2.00E−95 | Na (+): solute symporter |
| | | | | | | | (Ssf family) |
| 34 | 89047 | 24901 | 25710 | MCA100736 | g1513082 | 5.00E−67 | ATPase |
| 34 | 89047 | 23328 | 24365 | MCA100738 | g1786606 | 8.00E−89 | S- |
| | | | | | | | adenosylmethionine: tRNA |
| | | | | | | | ribosyltransferase- |
| | | | | | | | isomerase |
| 34 | 89047 | 22063 | 23202 | MCA100739 | g1573209 | e−147 | tRNA-guanine |
| | | | | | | | transglycosylase (tgt) |
| 34 | 89047 | 20280 | 21854 | MCA100740 | g536958 | 2.00E−74 | yjdB gene product |
| 34 | 89047 | 19010 | 19351 | MCA100742 | g1573052 | 7.00E−15 | conserved hypothetical |
| | | | | | | | protein |
| 34 | 89047 | 72176 | 72649 | MCA100857 | g929791 | 1.00E−22 | periplasmic or inner |
| | | | | | | | membrane associated |
| | | | | | | | protein |
| 34 | 89047 | 60817 | 61410 | MCA101043 | g312708 | 5.00E−41 | miaE |
| 34 | 89047 | 59356 | 60669 | MCA101044 | g1790609 | 8.00E−39 | orf, hypothetical |
| | | | | | | | protein |
| 34 | 89047 | 57906 | 58931 | MCA101045 | g1573704 | 7.00E−40 | conserved hypothetical |
| | | | | | | | protein |
| 34 | 89047 | 56828 | 57394 | MCA101047 | g3328430 | 3.00E−71 | Deoxycytidine |
| | | | | | | | triphosphate deaminase |
| | | | | | | | family protein |
| 34 | 89047 | 52985 | 53889 | MCA101051 | g2636549 | 2.00E−22 | similar to |
| | | | | | | | hypothetical proteins |
| 34 | 89047 | 51712 | 52935 | MCA101052 | g216628 | 4.00E−52 | UbiH (VisB) |
| 34 | 89047 | 50505 | 51353 | MCA101053 | g1787880 | 7.00E−32 | putative transport |
| | | | | | | | protein |
| 34 | 89047 | 48105 | 50117 | MCA101054 | g148182 | e−177 | rep helicase |
| 34 | 89047 | 46737 | 47753 | MCA101056 | g537005 | 4.00E−58 | ORF_f337 |
| 34 | 89047 | 74796 | 75440 | MCA101231 | g4520134 | 7.00E−73 | adenylate kinase |
| 34 | 89047 | 78867 | 80283 | MCA101233 | g3861163 | 9.00E−74 | 2- |
| | | | | | | | acylglycerophosphoetha |
| | | | | | | | nolamine |
| | | | | | | | acyltransferase |
| 34 | 89047 | 82080 | 83144 | MCA101235 | g1573700 | 1.00E−28 | conserved hypothetical |
| | | | | | | | protein |
| 34 | 89047 | 85493 | 88297 | MCA101238 | g1573699 | 2.00E−69 | conserved hypothetical |
| | | | | | | | protein |
| 34 | 89047 | 45297 | 45752 | MCA101341 | g1790038 | 3.00E−37 | protein export; |
| | | | | | | | molecular chaperone |
| 34 | 89047 | 44704 | 45165 | MCA101342 | g41300 | 4.00E−46 | dUTPase (dut) |
| 34 | 89047 | 44243 | 44665 | MCA101343 | g2984288 | 1.00E−33 | acetylglutamate kinase |
| 34 | 89047 | 43444 | 44199 | MCA101344 | g2462049 | 1.00E−14 | hypothetical protein |
| 34 | 89047 | 42700 | 43350 | MCA101345 | g1763619 | 6.00E−19 | potassium channel |
| | | | | | | | alpha subunit |
| 34 | 89047 | 39885 | 40328 | MCA101347 | g42848 | 6.00E−32 | ribosome protein L9 |
| | | | | | | | (aa 1-149) |
| 34 | 89047 | 39641 | 39865 | MCA101348 | g1573530 | 5.00E−29 | ribosomal protein S18 |
| | | | | | | | (rpS18) |
| 34 | 89047 | 39224 | 39610 | MCA101349 | g42845 | 2.00E−35 | ribosomal protein S6 |
| | | | | | | | (aa 1-131) |
| 34 | 89047 | 36447 | 37520 | MCA101351 | g1789272 | 1.00E−96 | tetrahydrofolate- |
| | | | | | | | dependent |
| | | | | | | | aminomethyltransferase |
| 34 | 89047 | 35751 | 36128 | MCA101352 | g1789271 | 8.00E−40 | carrier of aminomethyl |
| | | | | | | | moiety via lipoyl |
| | | | | | | | cofactor |
| 34 | 89047 | 32628 | 35462 | MCA101353 | g304892 | 0 | gcvHP |
| 34 | 89047 | 28777 | 30564 | MCA101356 | g3212231 | e−141 | TonB-dependent |
| | | | | | | | receptor, putative |
| 34 | 89047 | 73261 | 74523 | MCA101532 | | | |
| 34 | 89047 | 45820 | 46071 | MCA101632 | g3860768 | 7.00E−16 | glutaredoxin 3 |
| 34 | 89047 | 62090 | 63166 | MCA101727 | g1922276 | 2.00E−15 | porin |
| 34 | 89047 | 25927 | 26316 | MCA101860 | g4545096 | 5.00E−09 | unknown |
| 34 | 89047 | 38043 | 38363 | MCA101920 | g4062756 | 3.00E−08 | Hypothetical protein |
| | | | | | | | HI1446 |
| 34 | 89047 | 66384 | 67498 | MCA101922 | g1420975 | e−130 | aspartate semialdehyde |
| | | | | | | | dehydrogenase |
| 34 | 89047 | 57510 | 57803 | MCA102061 | | | |
| 34 | 89047 | 403 | 2859 | MCA102062 | g2983163 | 5.00E−07 | outer membrane protein c |
| 34 | 89047 | 3164 | 3520 | MCA102063 | | | |
| 34 | 89047 | 38496 | 38981 | MCA102068 | | | |
| 34 | 89047 | 13061 | 14095 | MCA102070 | g4456807 | 4.00E−07 | hypothetical protein |
| 34 | 89047 | 40804 | 41724 | MCA102072 | | | |
| 34 | 89047 | 41911 | 42456 | MCA102073 | g1790149 | 3.00E−12 | orf, hypothetical |
| | | | | | | | protein |
| 35 | 96109 | 63603 | 63740 | MCA100010 | g3603060 | 9.00E−11 | ribosomal protein L36 |
| 35 | 96109 | 63882 | 64673 | MCA100011 | g609333 | 6.00E−61 | orf272 |
| 35 | 96109 | 781 | 1275 | MCA100095 | g1789019 | 5.00E−25 | orf, hypothetical |
| | | | | | | | protein |
| 35 | 96109 | 31479 | 31784 | MCA100151 | g149064 | 4.00E−07 | insb (putative); |
| | | | | | | | putative |
| 35 | 96109 | 16679 | 17584 | MCA100238 | g1574277 | 9.00E−55 | geranyltranstransferase |
| | | | | | | | (ispA) |
| 35 | 96109 | 15484 | 16293 | MCA100239 | g146864 | 5.00E−60 | A/G-specific adenine |
| | | | | | | | glycosylase |
| 35 | 96109 | 14399 | 14971 | MCA100241 | g1314160 | 3.00E−20 | mitochondrial nuclease |
| 35 | 96109 | 330 | 551 | MCA100571 | g1173842 | 2.00E−20 | acyl carrier protein |
| 35 | 96109 | 91699 | 93600 | MCA100613 | g1574199 | 0 | threonyl-tRNA |
| | | | | | | | synthetase (thrS) |
| 35 | 96109 | 18008 | 18937 | MCA100723 | g1574400 | 3.00E−61 | 2-hydroxyacid |
| | | | | | | | dehydrogenase |
| 35 | 96109 | 19173 | 22007 | MCA100724 | g1786245 | 0 | probable ATP-dependent |
| | | | | | | | RNA helicase |
| 35 | 96109 | 23729 | 25783 | MCA100726 | g2695959 | 0 | fadH |
| 35 | 96109 | 64879 | 65883 | MCA100851 | g2198496 | 2.00E−51 | B1306.06c protein |
| 35 | 96109 | 68453 | 68746 | MCA100854 | g144052 | 5.00E−18 | outer membrane protein A |
| 35 | 96109 | 69092 | 69673 | MCA100855 | g1573697 | 3.00E−46 | conserved hypothetical |
| | | | | | | | protein |
| 35 | 96109 | 69937 | 71532 | MCA100856 | g790611 | 9.00E−63 | unknown |
| 35 | 96109 | 72055 | 72594 | MCA100858 | g2160520 | 2.00E−32 | ORF1; similar to E |
| | | | | | | | coli L28082 |
| 35 | 96109 | 72778 | 73755 | MCA100859 | | | |
| 35 | 96109 | 73860 | 74870 | MCA100860 | g3257505 | 2.00E−32 | homocysteine S- |
| | | | | | | | methyltransferase |
| 35 | 96109 | 89648 | 90142 | MCA100884 | g290449 | 6.00E−45 | initiation factor 3 |
| 35 | 96109 | 86580 | 88901 | MCA100886 | g1790622 | e−148 | putative enzyme |
| 35 | 96109 | 83852 | 85201 | MCA100889 | g2558473 | e−124 | Na-translocating NADH- |
| | | | | | | | quinone reductase |
| | | | | | | | alpha-subunit |
| 35 | 96109 | 82641 | 83837 | MCA100890 | g1573123 | e−138 | NADH: ubiquinone |
| | | | | | | | oxidoreductase, |
| | | | | | | | subunit B (nqrB) |
| 35 | 96109 | 81848 | 82621 | MCA100891 | g2558475 | 2.00E−42 | Na-translocating NADH- |
| | | | | | | | quinone reductase |
| | | | | | | | gamma-subunit |
| 35 | 96109 | 81207 | 81806 | MCA100892 | g1573125 | 2.00E−71 | NADH: ubiquinone |
| | | | | | | | oxidoreductase, Na |
| | | | | | | | translocating |
| 35 | 96109 | 80542 | 81147 | MCA100893 | g2558477 | 2.00E−78 | Na-translocating NADH- |
| | | | | | | | quinone reductase |
| | | | | | | | subunit 5 |
| 35 | 96109 | 79287 | 80495 | MCA100894 | g1573127 | e−164 | Na-translocating NADH- |
| | | | | | | | quinone reductase |
| | | | | | | | beta-subunit |
| 35 | 96109 | 22117 | 23637 | MCA100915 | g1001214 | e−134 | hypothetical protein |
| 35 | 96109 | 2411 | 4147 | MCA100916 | g1786265 | 0 | acetolactate synthase |
| | | | | | | | III, val sensitive, |
| | | | | | | | large subunit |
| 35 | 96109 | 4168 | 4656 | MCA100917 | g1786266 | 6.00E−44 | acetolactate synthase |
| | | | | | | | III, val sensitive, |
| | | | | | | | small subunit |
| 35 | 96109 | 4835 | 5848 | MCA100918 | g2529237 | e−125 | acetohydroxy acid |
| | | | | | | | isomeroreductase |
| 35 | 96109 | 5960 | 6370 | MCA100919 | | | |
| 35 | 96109 | 6718 | 6918 | MCA100920 | g4454361 | 4.00E−22 | cold shock protein, |
| | | | | | | | CSPA |
| 35 | 96109 | 7163 | 7651 | MCA100921 | g1573284 | 2.00E−42 | crossover junction |
| | | | | | | | endodeoxyribonuclease |
| | | | | | | | (ruvC) |
| 35 | 96109 | 7852 | 8388 | MCA100922 | | | |
| 35 | 96109 | 8484 | 9779 | MCA100923 | g3298336 | 1.00E−65 | NorM |
| 35 | 96109 | 10000 | 11088 | MCA100924 | g1574692 | 5.00E−58 | cell division protein |
| | | | | | | | (ftsW) |
| 35 | 96109 | 11357 | 12736 | MCA100925 | g1574691 | 1.00E−75 | UDP-N- |
| | | | | | | | acetylmuramoylalanine- |
| | | | | | | | -D-glutamate ligase |
| 35 | 96109 | 12938 | 13273 | MCA100926 | g2735324 | 7.00E−44 | PII-protein |
| 35 | 96109 | 66095 | 66631 | MCA100978 | g3323304 | 7.00E−13 | glpG protein, putative |
| 35 | 96109 | 26724 | 27458 | MCA101006 | g473823 | 3.00E−85 | ‘methionine |
| | | | | | | | aminopeptidase’ |
| 35 | 96109 | 27687 | 30377 | MCA101007 | g39257 | e−153 | uridylyl transferase |
| 35 | 96109 | 30510 | 31373 | MCA101008 | | | |
| 35 | 96109 | 32708 | 33978 | MCA101010 | g1788783 | 3.00E−40 | putative prophage |
| | | | | | | | integrase |
| 35 | 96109 | 35233 | 36276 | MCA101012 | | | |
| 35 | 96109 | 36398 | 37465 | MCA101013 | | | |
| 35 | 96109 | 37547 | 37858 | MCA101014 | | | |
| 35 | 96109 | 37855 | 38175 | MCA101015 | | | |
| 35 | 96109 | 56595 | 57344 | MCA101109 | g1573676 | 4.00E−56 | integrase/recombinase |
| | | | | | | | (xerC) |
| 35 | 96109 | 39637 | 39939 | MCA101486 | | | |
| 35 | 96109 | 40057 | 40410 | MCA101487 | | | |
| 35 | 96109 | 45467 | 46231 | MCA101490 | g1573242 | 2.00E−36 | ribonuclease BN (rbn) |
| 35 | 96109 | 46598 | 46957 | MCA101491 | g3493605 | 3.00E−30 | Trp repressor binding |
| | | | | | | | protein |
| 35 | 96109 | 47185 | 47616 | MCA101492 | | | |
| 35 | 96109 | 48860 | 49144 | MCA101494 | g149688 | 3.00E−32 | htpA |
| 35 | 96109 | 49273 | 50910 | MCA101495 | g499206 | 0 | GroEL |
| 35 | 96109 | 51130 | 51963 | MCA101496 | g1789192 | 1.00E−74 | prolipoprotein |
| | | | | | | | diacylglyceryl |
| | | | | | | | transferase |
| 35 | 96109 | 51990 | 52829 | MCA101497 | g2258280 | 2.00E−97 | thymidylate synthase |
| 35 | 96109 | 52856 | 53290 | MCA101498 | g665643 | 1.00E−28 | dihydrofolate |
| | | | | | | | reductase |
| 35 | 96109 | 53413 | 54426 | MCA101499 | g1573128 | 3.00E−47 | lipoprotein, putative |
| 35 | 96109 | 54579 | 55025 | MCA101500 | | | |
| 35 | 96109 | 55115 | 56281 | MCA101501 | g216628 | 1.00E−35 | UbiH (VisB) |
| 35 | 96109 | 57647 | 58471 | MCA101503 | g1790242 | 4.00E−80 | diaminopimelate |
| | | | | | | | epimerase |
| 35 | 96109 | 58748 | 59965 | MCA101504 | g1929094 | e−110 | LysA protein |
| 35 | 96109 | 60612 | 61766 | MCA101506 | g1405880 | 5.00E−83 | acetate kinase |
| 35 | 96109 | 62334 | 63320 | MCA101508 | g1574131 | e−127 | phosphate |
| | | | | | | | acetyltransferase |
| | | | | | | | (pta) |
| 35 | 96109 | 26139 | 26477 | MCA101763 | g2564977 | 4.00E−09 | hypothetical protein |
| 35 | 96109 | 41837 | 43138 | MCA101842 | g1033120 | 3.00E−15 | ORF_o469 |
| 35 | 96109 | 85730 | 86452 | MCA101876 | g836646 | 9.00E−64 | phosphoribosylformimino- |
| | | | | | | | 5-aminoimidazole |
| | | | | | | | carboxamide |
| 35 | 96109 | 89243 | 89524 | MCA101877 | g42742 | 2.00E−11 | rimI protein (AA 1-161) |
| 35 | 96109 | 75011 | 75493 | MCA101878 | g4062570 | 5.00E−37 | 4-hydroxyphenylacetate |
| | | | | | | | 3-monooxygenase (EC |
| | | | | | | | 1.14.13.3) |
| 35 | 96109 | 75733 | 77289 | MCA101881 | g1787597 | 7.00E−94 | putative pump protein |
| | | | | | | | (transport) |
| 35 | 96109 | 77651 | 79135 | MCA101882 | g1573949 | 0 | catalase (hktE) |
| 35 | 96109 | 38185 | 38586 | MCA101930 | | | |
| 35 | 96109 | 40762 | 41004 | MCA102021 | g2313086 | 1.00E−08 | DNA primase (dnaG) |
| 35 | 96109 | 43196 | 43354 | MCA102022 | | | |
| 35 | 96109 | 95181 | 95342 | MCA102078 | | | |
| 36 | 92407 | 91233 | 91847 | MCA100081 | g2635437 | 1.00E−27 | similar to protease IV |
| 36 | 92407 | 50092 | 50511 | MCA100085 | g1574283 | 3.00E−53 | ribosomal protein L13 |
| | | | | | | | (rpL13) |
| 36 | 92407 | 49696 | 50073 | MCA100086 | g241867 | 3.00E−44 | ribosomal protein S9 |
| | | | | | | | homolog = rpsI |
| 36 | 92407 | 7088 | 7378 | MCA100136 | g2865528 | 1.00E−13 | mono-heme c-type |
| | | | | | | | cytochrome ScyA |
| 36 | 92407 | 7748 | 8335 | MCA100137 | g516878 | 3.00E−35 | cytochrome c4 |
| | | | | | | | preprotein |
| 36 | 92407 | 14107 | 15696 | MCA100530 | g581070 | e−144 | acyl coenzyme A |
| | | | | | | | synthetase |
| 36 | 92407 | 12531 | 13733 | MCA100531 | g1573978 | 2.00E−83 | DNA/pantothenate |
| | | | | | | | metabolism |
| | | | | | | | flavoprotein (dfp) |
| 36 | 92407 | 11001 | 12140 | MCA100532 | g551299 | e−106 | Na+/H+ antiporter |
| 36 | 92407 | 16025 | 17620 | MCA100708 | g581070 | e−166 | acyl coenzyme A |
| | | | | | | | synthetase |
| 36 | 92407 | 17919 | 18623 | MCA100709 | g1079663 | 6.00E−79 | RNase PH |
| 36 | 92407 | 18634 | 19089 | MCA100710 | | | |
| 36 | 92407 | 19908 | 20546 | MCA100712 | g436881 | 2.00E−34 | outer membrane |
| | | | | | | | phospholipase A |
| 36 | 92407 | 20579 | 21427 | MCA100713 | | | |
| 36 | 92407 | 21387 | 21977 | MCA100714 | | | |
| 36 | 92407 | 21974 | 22960 | MCA100715 | | | |
| 36 | 92407 | 22957 | 23763 | MCA100716 | | | |
| 36 | 92407 | 816 | 1589 | MCA100752 | g2984360 | 7.00E−71 | thiamine biosynthesis, |
| | | | | | | | thiazole moiety |
| 36 | 92407 | 1761 | 3098 | MCA100753 | g2960158 | 7.00E−59 | hypothetical protein |
| | | | | | | | Rv3734c |
| 36 | 92407 | 3243 | 5234 | MCA100754 | g1574731 | 0 | methionyl-tRNA |
| | | | | | | | synthetase (metG) |
| 36 | 92407 | 5571 | 6977 | MCA100755 | g41206 | e−132 | cysteinyl-tRNA |
| | | | | | | | synthetase |
| 36 | 92407 | 61788 | 63133 | MCA100840 | g1788963 | e−156 | GTP-binding export |
| | | | | | | | factor |
| 36 | 92407 | 63356 | 64015 | MCA100842 | g1788109 | 4.00E−20 | orf, hypothetical |
| | | | | | | | protein |
| 36 | 92407 | 64186 | 64992 | MCA100843 | g1789437 | 4.00E−43 | bacitracin resistance |
| 36 | 92407 | 65314 | 65850 | MCA100844 | g3851182 | 5.00E−14 | unknown |
| 36 | 92407 | 65942 | 66205 | MCA100845 | | | |
| 36 | 92407 | 66244 | 67065 | MCA100846 | g396375 | 5.00E−64 | 4-hydroxybenzoate- |
| | | | | | | | octaprenyl transferase |
| 36 | 92407 | 67362 | 68897 | MCA100847 | g1449339 | e−137 | pitB |
| 36 | 92407 | 69294 | 69974 | MCA100848 | g606374 | 9.00E−53 | ORF_f231 |
| 36 | 92407 | 70365 | 70850 | MCA100849 | g1574067 | 2.00E−34 | conserved hypothetical |
| | | | | | | | protein |
| 36 | 92407 | 70982 | 71563 | MCA100850 | g497127 | 2.00E−55 | RNase T |
| 36 | 92407 | 38857 | 39717 | MCA100927 | g4376782 | 5.00E−12 | CT391 hypothetical |
| | | | | | | | protein |
| 36 | 92407 | 40914 | 41549 | MCA100929 | g3860928 | 5.00E−25 | ABC transporter ATP- |
| | | | | | | | binding protein |
| 36 | 92407 | 42061 | 44601 | MCA100931 | g1573874 | 0 | ATP-dependent Clp |
| | | | | | | | protease, ATPase |
| | | | | | | | subunit (clpB) |
| 36 | 92407 | 45517 | 45870 | MCA100933 | g1574279 | 2.00E−28 | stringent starvation |
| | | | | | | | protein B (sspB) |
| 36 | 92407 | 45891 | 46442 | MCA100934 | g42998 | 6.00E−33 | SSP (AA1-212) |
| 36 | 92407 | 46643 | 47320 | MCA100935 | g2642363 | 1.00E−39 | cytochrome c1 |
| 36 | 92407 | 47395 | 48567 | MCA100936 | g2642362 | e−133 | cytochrome b |
| 36 | 92407 | 48597 | 49166 | MCA100937 | g2642361 | 4.00E−48 | Fe-S protein |
| 36 | 92407 | 88972 | 90090 | MCA101033 | g305386 | 6.00E−21 | recombination protein |
| 36 | 92407 | 81971 | 82912 | MCA101037 | g1377868 | 2.00E−47 | cbb3-type cytochrome c |
| | | | | | | | oxidase CcoP subunit |
| 36 | 92407 | 71602 | 72657 | MCA101086 | g3868712 | e−114 | dihydroorotase |
| 36 | 92407 | 72855 | 74180 | MCA101087 | g1574583 | 0 | argininosuccinate |
| | | | | | | | synthetase (argG) |
| 36 | 92407 | 74397 | 74897 | MCA101088 | | | |
| 36 | 92407 | 75049 | 75960 | MCA101089 | g3643996 | 2.00E−30 | putative regulatory |
| | | | | | | | protein |
| 36 | 92407 | 76983 | 78173 | MCA101091 | g152210 | 4.00E−68 | nitrogen fixation |
| | | | | | | | protein fixG |
| 36 | 92407 | 79617 | 80960 | MCA101093 | g1552601 | e−179 | FixNd |
| 36 | 92407 | 81064 | 81636 | MCA101094 | g1002879 | 3.00E−56 | CcoO |
| 36 | 92407 | 83103 | 84722 | MCA101097 | g1574630 | 0 | CTP synthetase (pyrG) |
| 36 | 92407 | 84893 | 85729 | MCA101098 | g4235471 | e−114 | 2-dehydro-3- |
| | | | | | | | deoxyphosphooctonate |
| | | | | | | | aldolase |
| 36 | 92407 | 85823 | 87097 | MCA101099 | g1789141 | e−156 | enolase |
| 36 | 92407 | 87210 | 87455 | MCA101100 | g1789105 | 4.00E−08 | orf, hypothetical |
| | | | | | | | protein |
| 36 | 92407 | 87621 | 88316 | MCA101101 | g1573673 | 3.00E−36 | conserved hypothetical |
| | | | | | | | protein |
| 36 | 92407 | 39980 | 40804 | MCA101148 | g3860927 | 4.00E−24 | unknown |
| 36 | 92407 | 59021 | 60271 | MCA101153 | g42913 | 1.00E−58 | ORF 45 peptide (AA 1-400) |
| 36 | 92407 | 55081 | 58941 | MCA101154 | g42914 | 1.00E−59 | SbcC (AA 1-1048) |
| 36 | 92407 | 51152 | 52987 | MCA101156 | g581463 | 0 | homologous to E. coli |
| | | | | | | | gidA |
| 36 | 92407 | 35356 | 36111 | MCA101172 | g1651445 | 2.00E−42 | SmtA protein. |
| 36 | 92407 | 33986 | 35242 | MCA101173 | g1245347 | 2.00E−43 | AlgI |
| 36 | 92407 | 30688 | 31161 | MCA101176 | g2765835 | 2.00E−29 | hypothetical protein |
| 36 | 92407 | 29194 | 30474 | MCA101177 | g3132889 | 1.00E−62 | WaaA |
| 36 | 92407 | 26469 | 28985 | MCA101178 | g1574460 | e−160 | aminopeptidase N |
| | | | | | | | (pepN) |
| 36 | 92407 | 25542 | 26057 | MCA101179 | g663068 | 1.00E−26 | PAL |
| 36 | 92407 | 8594 | 9688 | MCA101272 | | | |
| 36 | 92407 | 9676 | 10008 | MCA101294 | | | |
| 36 | 92407 | 24074 | 24832 | MCA101848 | | | |
| 36 | 92407 | 36281 | 37267 | MCA101850 | | | |
| 36 | 92407 | 37432 | 38508 | MCA101851 | g3860926 | 1.00E−08 | unknown |
| 36 | 92407 | 60775 | 61569 | MCA101909 | g1788964 | 2.00E−15 | orf, hypothetical |
| | | | | | | | protein |
| 36 | 92407 | 81687 | 81869 | MCA101928 | | | |
| 36 | 92407 | 53341 | 54315 | MCA101944 | | | |
| 36 | 92407 | 54504 | 54968 | MCA101945 | | | |
| 37 | 99629 | 69767 | 70210 | MCA100038 | g1718488 | 6.00E−34 | FabZ |
| 37 | 99629 | 70275 | 71039 | MCA100039 | g1786378 | 3.00E−77 | UDP-N- |
| | | | | | | | acetylglucosamine |
| | | | | | | | acetyltransferase |
| 37 | 99629 | 71432 | 72897 | MCA100082 | g1573742 | e−119 | sodium-dependent |
| | | | | | | | transporter, putative |
| 37 | 99629 | 76489 | 78342 | MCA100169 | g2599340 | 2.00E−40 | protein-disulfide |
| | | | | | | | reductase |
| 37 | 99629 | 51376 | 52041 | MCA100276 | g2865530 | 3.00E−30 | cytochrome c |
| | | | | | | | maturation protein B |
| 37 | 99629 | 73294 | 74871 | MCA100290 | g142301 | e−168 | cytochrome d subunit |
| | | | | | | | Ia |
| 37 | 99629 | 74913 | 76046 | MCA100291 | g1786954 | 2.00E−99 | cytochrome d terminal |
| | | | | | | | oxidase polypeptide |
| | | | | | | | subunit II |
| 37 | 99629 | 66172 | 68571 | MCA100323 | g1552754 | e−123 | hypothetical protein |
| 37 | 99629 | 68643 | 69560 | MCA100324 | g1573936 | 2.00E−56 | UDP-3-O-(3- |
| | | | | | | | hydroxymyristoyl)- |
| | | | | | | | glucosamine N- |
| | | | | | | | acyltransfer |
| 37 | 99629 | 33622 | 34110 | MCA100374 | g1574669 | 1.00E−31 | thioredoxin, putative |
| 37 | 99629 | 32014 | 33450 | MCA100375 | g1573139 | e−105 | amino acid carrier |
| | | | | | | | protein, putative |
| 37 | 99629 | 2692 | 5811 | MCA100461 | g438854 | 0 | envD homologue; ORFB |
| 37 | 99629 | 5884 | 7308 | MCA100564 | g3184190 | 3.00E−77 | OprM |
| 37 | 99629 | 8308 | 9618 | MCA100566 | g1061260 | 2.00E−68 | putative protein |
| 37 | 99629 | 9973 | 11343 | MCA100567 | g1788397 | e−165 | orf, hypothetical |
| | | | | | | | protein |
| 37 | 99629 | 11391 | 12323 | MCA100568 | g2314272 | 6.00E−88 | cytosine specific DNA |
| | | | | | | | methyltransferase |
| | | | | | | | (BSP6IM) |
| 37 | 99629 | 2 | 532 | MCA100700 | g1786393 | 5.00E−27 | orf, hypothetical |
| | | | | | | | protein |
| 37 | 99629 | 56471 | 57733 | MCA100776 | g1651420 | e−145 | Serine-tRNA ligase (EC |
| | | | | | | | 6.1.1.11) |
| 37 | 99629 | 57951 | 59921 | MCA100777 | g2367177 | 0 | transketolase 1 |
| | | | | | | | isozyme |
| 37 | 99629 | 60119 | 60835 | MCA100778 | g3417448 | 1.00E−67 | UMP kinase |
| 37 | 99629 | 60950 | 61501 | MCA100779 | g3417449 | 1.00E−63 | ribosome recycling |
| | | | | | | | factor |
| 37 | 99629 | 61598 | 62323 | MCA100780 | g1786371 | 5.00E−54 | orf, hypothetical |
| | | | | | | | protein |
| 37 | 99629 | 62522 | 63199 | MCA100781 | g1262332 | 5.00E−39 | CDP-diglyceride |
| | | | | | | | synthetase |
| 37 | 99629 | 63358 | 64560 | MCA100782 | g1786369 | 3.00E−85 | putative ATP-binding |
| | | | | | | | component of a |
| | | | | | | | transport system |
| 37 | 99629 | 64584 | 65951 | MCA100783 | g1552753 | 8.00E−83 | hypothetical |
| 37 | 99629 | 34923 | 35243 | MCA100789 | g142304 | 3.00E−52 | ferredoxin I |
| 37 | 99629 | 1269 | 2564 | MCA100852 | g532310 | 1.00E−61 | 42 kDa protein |
| 37 | 99629 | 26942 | 30208 | MCA101055 | g2367096 | 0 | isoleucine tRNA |
| | | | | | | | synthetase |
| 37 | 99629 | 83288 | 84046 | MCA101084 | g1789140 | 3.00E−18 | orf, hypothetical |
| | | | | | | | protein |
| 37 | 99629 | 30484 | 31758 | MCA101163 | g4062560 | e−147 | Uracil transport |
| | | | | | | | protein |
| 37 | 99629 | 38692 | 40539 | MCA101256 | | | |
| 37 | 99629 | 40499 | 41389 | MCA101257 | | | |
| 37 | 99629 | 43223 | 46123 | MCA101259 | g1574225 | 0 | valyl-tRNA synthetase |
| | | | | | | | (valS) |
| 37 | 99629 | 46207 | 47085 | MCA101260 | g303628 | e−161 | MboI methyltransferase A |
| 37 | 99629 | 47093 | 47932 | MCA101261 | g303629 | e−151 | MboI endonuclease |
| 37 | 99629 | 47937 | 48755 | MCA101262 | g303630 | e−145 | MboI methyltransferase C |
| 37 | 99629 | 50795 | 51373 | MCA101265 | g46024 | 2.00E−25 | helA |
| 37 | 99629 | 26437 | 26910 | MCA101360 | g151348 | 3.00E−35 | signal peptidase II |
| 37 | 99629 | 25749 | 26177 | MCA101361 | g151349 | 2.00E−26 | ORF149 |
| 37 | 99629 | 24426 | 25547 | MCA101362 | g1835114 | 1.00E−95 | homoserine O- |
| | | | | | | | acetyltransferase |
| 37 | 99629 | 23029 | 23605 | MCA101364 | g4062259 | 6.00E−14 | Sel-1 protein |
| 37 | 99629 | 20479 | 22755 | MCA101365 | g308942 | 0 | major outer membrane |
| | | | | | | | protein |
| 37 | 99629 | 18600 | 20063 | MCA101366 | g38720 | 0 | IMP dehydrogenase |
| 37 | 99629 | 17326 | 18006 | MCA101368 | g3135321 | 7.00E−33 | putative |
| | | | | | | | thiol: disulfide |
| | | | | | | | interchange protein |
| | | | | | | | precursor |
| 37 | 99629 | 15653 | 16846 | MCA101369 | g45329 | 8.00E−97 | homoserine |
| | | | | | | | dehydrogenase |
| 37 | 99629 | 14813 | 15373 | MCA101370 | g1790296 | 1.00E−55 | orf, hypothetical |
| | | | | | | | protein |
| 37 | 99629 | 13917 | 14735 | MCA101371 | g606086 | 6.00E−72 | ORF_f286 |
| 37 | 99629 | 78730 | 80198 | MCA101417 | g141886 | 0 | acetaldehyde |
| | | | | | | | dehydrogenase II |
| 37 | 99629 | 80403 | 81914 | MCA101418 | g2635246 | e−118 | similar to |
| | | | | | | | sodium/proton- |
| | | | | | | | dependent alanine |
| | | | | | | | carrier prot |
| 37 | 99629 | 82372 | 82926 | MCA101419 | g3322862 | 1.00E−33 | Tp70 protein |
| 37 | 99629 | 84049 | 84567 | MCA101421 | | | |
| 37 | 99629 | 98444 | 98752 | MCA101422 | g216636 | 3.00E−21 | ribosomal protein L21 |
| 37 | 99629 | 85377 | 86027 | MCA101423 | g4102010 | 2.00E−38 | putative transposase |
| 37 | 99629 | 86093 | 86667 | MCA101424 | g4512224 | 2.00E−26 | Similar to IS1301 of |
| | | | | | | | Neisseria meningitidis |
| 37 | 99629 | 86955 | 88568 | MCA101426 | g1747491 | 0 | alxA |
| 37 | 99629 | 88573 | 89919 | MCA101427 | g1685099 | 4.00E−56 | HSDS |
| 37 | 99629 | 91158 | 94300 | MCA101429 | g1685100 | 0 | HSDR |
| 37 | 99629 | 94381 | 95240 | MCA101430 | g1786518 | 6.00E−66 | putative |
| | | | | | | | oxidoreductase |
| 37 | 99629 | 95287 | 95940 | MCA101431 | g1574733 | 5.00E−72 | NAD(P)H-flavin |
| | | | | | | | oxidoreductase |
| 37 | 99629 | 96051 | 97094 | MCA101432 | g1303964 | 2.00E−70 | YqjM |
| 37 | 99629 | 97366 | 98229 | MCA101433 | g150233 | 6.00E−30 | nahR protein precursor |
| 37 | 99629 | 98820 | 99074 | MCA101440 | g216637 | 2.00E−28 | ribosomal protein L27 |
| 37 | 99629 | 13079 | 13333 | MCA101463 | g1518927 | 6.00E−28 | ferredoxin |
| 37 | 99629 | 13439 | 13879 | MCA101466 | g1575483 | 3.00E−23 | LporfX |
| 37 | 99629 | 12334 | 13065 | MCA101598 | g4155637 | 9.00E−79 | putative |
| 37 | 99629 | 53924 | 54736 | MCA101923 | g765096 | 2.00E−94 | heat-shock sigma |
| | | | | | | | factor |
| 37 | 99629 | 36268 | 37779 | MCA101924 | g1787309 | e−103 | putative virulence |
| | | | | | | | factor |
| 37 | 99629 | 37994 | 38530 | MCA101929 | g4079828 | 8.00E−45 | N-acetyl- |
| | | | | | | | anhydromuramyl-L- |
| | | | | | | | alanine amidase |
| 37 | 99629 | 41474 | 42911 | MCA101936 | g2633081 | e−119 | similar to 2- |
| | | | | | | | oxoglutarate/malate |
| | | | | | | | translocator |
| 37 | 99629 | 48799 | 49662 | MCA101938 | g580726 | 7.00E−63 | Portion of |
| | | | | | | | hypothetical protein |
| 37 | 99629 | 52121 | 52933 | MCA101939 | g3513356 | 3.00E−39 | hypothetical protein |
| 37 | 99629 | 89930 | 91132 | MCA102002 | | | |
| 38 | 94750 | 82819 | 83559 | MCA100037 | g1573162 | 3.00E−71 | tRNA (guanine-N1)- |
| | | | | | | | methyltransferase |
| | | | | | | | (trmD) |
| 38 | 94750 | 83736 | 84065 | MCA100220 | g1800011 | 8.00E−36 | ribosomal protein L19 |
| 38 | 94750 | 84195 | 84599 | MCA100221 | g145063 | 8.00E−31 | two-subunit pilin |
| | | | | | | | precursor |
| 38 | 94750 | 38362 | 39300 | MCA100287 | | | |
| 38 | 94750 | 39368 | 40069 | MCA100288 | g39705 | 3.00E−27 | fimC |
| 38 | 94750 | 37413 | 38177 | MCA100301 | g1573311 | 4.00E−49 | conserved hypothetical |
| | | | | | | | protein |
| 38 | 94750 | 36351 | 37259 | MCA100302 | g1786208 | 7.00E−49 | putative regulator |
| 38 | 94750 | 43520 | 43906 | MCA100403 | g1055071 | 7.00E−33 | C23G10.2 gene product |
| 38 | 94750 | 40106 | 42352 | MCA100405 | g147345 | e−140 | primosomal protein n' |
| 38 | 94750 | 601 | 1360 | MCA100435 | g2633826 | 1.00E−30 | similar to |
| | | | | | | | hypothetical proteins |
| 38 | 94750 | 1401 | 2000 | MCA100436 | g1001747 | 1.00E−40 | alkaline phosphatase- |
| | | | | | | | like |
| 38 | 94750 | 2433 | 3071 | MCA100437 | g1574697 | 4.00E−12 | cell division protein |
| | | | | | | | (ftsQ) |
| 38 | 94750 | 3143 | 4201 | MCA100438 | g2738588 | 5.00E−23 | cell division protein |
| 38 | 94750 | 77707 | 78381 | MCA100467 | g1079807 | 9.00E−42 | RstA |
| 38 | 94750 | 79179 | 80048 | MCA100469 | g1742648 | 4.00E−37 | Sensor protein RstB |
| | | | | | | | (EC 2.7.3.—). |
| 38 | 94750 | 81833 | 82078 | MCA100471 | g1573164 | 3.00E−25 | ribosomal protein S16 |
| | | | | | | | (rpS16) |
| 38 | 94750 | 82288 | 82782 | MCA100472 | g1573163 | 7.00E−26 | conserved hypothetical |
| | | | | | | | protein |
| 38 | 94750 | 29640 | 30077 | MCA100521 | g4164224 | 3.00E−55 | ferric uptake |
| | | | | | | | regulator |
| 38 | 94750 | 30269 | 31297 | MCA100522 | g151490 | 7.00E−90 | twitching motility |
| | | | | | | | protein |
| 38 | 94750 | 31720 | 32301 | MCA100523 | g454838 | 7.00E−51 | ORF 6; putative |
| 38 | 94750 | 32364 | 33974 | MCA100524 | g1653472 | e−120 | NH(3)-dependent NAD(+) |
| | | | | | | | synthetase |
| 38 | 94750 | 25258 | 27037 | MCA100546 | g2735093 | 0 | ubiquitous surface |
| | | | | | | | protein A 2 |
| 38 | 94750 | 27198 | 28070 | MCA100547 | g2677632 | 1.00E−66 | methionine regulatory |
| | | | | | | | protein MetR |
| 38 | 94750 | 28330 | 28986 | MCA100548 | g1799710 | 3.00E−47 | dedA protein |
| 38 | 94750 | 70429 | 71286 | MCA100628 | g669111 | 9.00E−79 | alternate atpB CDS |
| 38 | 94750 | 71347 | 71586 | MCA100629 | g1573462 | 1.00E−14 | ATP synthase F0, |
| | | | | | | | subunit c (atpE) |
| 38 | 94750 | 71683 | 72144 | MCA100630 | g581814 | 4.00E−30 | uncF (AA 1-156) |
| 38 | 94750 | 72160 | 72699 | MCA100631 | g48336 | 9.00E−26 | uncH (AA 1-177) |
| 38 | 94750 | 72749 | 74284 | MCA100632 | g1790172 | 0 | membrane-bound ATP |
| | | | | | | | synthase, F1 sector, |
| | | | | | | | alpha-subunit |
| 38 | 94750 | 74372 | 75238 | MCA100633 | g1790171 | 3.00E−96 | membrane-bound ATP |
| | | | | | | | synthase, F1 sector, |
| | | | | | | | gamma-subunit |
| 38 | 94750 | 75694 | 77103 | MCA100635 | g1573457 | 0 | ATP synthase F1, |
| | | | | | | | subunit beta (atpD) |
| 38 | 94750 | 77188 | 77586 | MCA100636 | g1573456 | 2.00E−16 | ATP synthase F1, |
| | | | | | | | subunit epsilon (atpC) |
| 38 | 94750 | 42399 | 43304 | MCA100808 | g1788771 | 1.00E−66 | orf, hypothetical |
| | | | | | | | protein |
| 38 | 94750 | 23867 | 24892 | MCA101243 | g1573514 | e−106 | O-sialoglycoprotein |
| | | | | | | | endopeptidase (gcp) |
| 38 | 94750 | 29005 | 29400 | MCA101264 | g1033113 | 1.00E−11 | ORF_o113 |
| 38 | 94750 | 4673 | 5742 | MCA101528 | g216509 | 3.00E−82 | cell division protein |
| | | | | | | | fstZ |
| 38 | 94750 | 5866 | 6756 | MCA101529 | g1574235 | 1.00E−42 | conserved hypothetical |
| | | | | | | | protein |
| 38 | 94750 | 7767 | 8792 | MCA101531 | g440089 | e−137 | RecA |
| 38 | 94750 | 9699 | 11027 | MCA101533 | g3876615 | e−112 | Similar to Yeast D- |
| | | | | | | | lactate dehydrogenase |
| | | | | | | | (SW: DLD1_YEAST) |
| 38 | 94750 | 11050 | 11592 | MCA101534 | | | |
| 38 | 94750 | 11674 | 12723 | MCA101535 | | | |
| 38 | 94750 | 12838 | 13641 | MCA101536 | g1573029 | 1.00E−27 | conserved hypothetical |
| | | | | | | | protein |
| 38 | 94750 | 13667 | 14434 | MCA101537 | g1789177 | 1.00E−42 | putative enzyme |
| 38 | 94750 | 14676 | 15545 | MCA101538 | g1574480 | e−101 | 2,3,4,5- |
| | | | | | | | tetrahydropyridine-2- |
| | | | | | | | carboxylate N- |
| | | | | | | | succinyltransf |
| 38 | 94750 | 16830 | 17747 | MCA101540 | g1572971 | 3.00E−93 | lipoate biosynthesis |
| | | | | | | | protein A (lipA) |
| 38 | 94750 | 18269 | 19222 | MCA101542 | g1786681 | 2.00E−89 | ferrochelatase: final |
| | | | | | | | enzyme of heme |
| | | | | | | | biosynthesis |
| 38 | 94750 | 19956 | 21070 | MCA101544 | g1652222 | 9.00E−44 | hypothetical protein |
| 38 | 94750 | 21261 | 23480 | MCA101545 | g1030696 | 0 | isocitrate |
| | | | | | | | dehydrogenase |
| 38 | 94750 | 44197 | 46308 | MCA101565 | g1574600 | 9.00E−78 | guanosine-3′,5′- |
| | | | | | | | bis (diphosphate) 3′- |
| | | | | | | | pyrophosphohydrolase |
| 38 | 94750 | 46693 | 46932 | MCA101566 | g1574602 | 1.00E−14 | DNA-directed RNA |
| | | | | | | | polymerase, omega |
| | | | | | | | chain (rpoZ) |
| 38 | 94750 | 47038 | 47643 | MCA101567 | g290498 | 2.00E−50 | 5′ guanylate kinase |
| 38 | 94750 | 47816 | 48742 | MCA101568 | g216456 | e−110 | hypothetical 34.8 K |
| | | | | | | | protein(PIR: JE0403) |
| 38 | 94750 | 48853 | 50493 | MCA101569 | g1789259 | e−124 | ssDNA exonuclease, |
| | | | | | | | 5′-> 3′ specific |
| 38 | 94750 | 50589 | 51176 | MCA101570 | g290496 | 2.00E−33 | o223 |
| 38 | 94750 | 51346 | 52017 | MCA101572 | g2984272 | 3.00E−19 | hypothetical protein |
| 38 | 94750 | 52519 | 53892 | MCA101574 | g2340815 | 0 | L-2,4- |
| | | | | | | | diaminobutyrate: 2- |
| | | | | | | | ketoglutarate 4- |
| | | | | | | | aminotransferase |
| 38 | 94750 | 54051 | 55967 | MCA101575 | g4454667 | e−134 | methyltransferase |
| 38 | 94750 | 55995 | 58601 | MCA101576 | g4454668 | 0 | restriction |
| | | | | | | | endonuclease |
| 38 | 94750 | 58652 | 60190 | MCA101577 | g893355 | 0 | L-2,4-diaminobutyrate |
| | | | | | | | decarboxylase |
| 38 | 94750 | 60278 | 62041 | MCA101578 | g472402 | e−128 | UVR excinuclease |
| | | | | | | | subunit C |
| 38 | 94750 | 62223 | 62858 | MCA101579 | g1573552 | 2.00E−44 | phosphoglycolate |
| | | | | | | | phosphatase (gph) |
| 38 | 94750 | 63199 | 63741 | MCA101580 | | | |
| 38 | 94750 | 63889 | 64746 | MCA101581 | g1786337 | 1.00E−42 | putative tRNA |
| | | | | | | | synthetase |
| 38 | 94750 | 64772 | 65185 | MCA101582 | g1786338 | 4.00E−43 | dnaK suppressor |
| | | | | | | | protein |
| 38 | 94750 | 65335 | 66003 | MCA101583 | g882562 | 1.00E−23 | icc gene product |
| 38 | 94750 | 66160 | 66916 | MCA101584 | g1573380 | 3.00E−27 | conserved hypothetical |
| | | | | | | | integral membrane |
| | | | | | | | protein |
| 38 | 94750 | 66967 | 67674 | MCA101585 | g1736501 | 1.00E−47 | Sulfate transport ATP- |
| | | | | | | | binding protein CYsA. |
| 38 | 94750 | 67700 | 68140 | MCA101586 | g1790480 | 7.00E−20 | putative regulator |
| 38 | 94750 | 69471 | 69878 | MCA101588 | | | |
| 38 | 94750 | 75267 | 75602 | MCA101681 | | | |
| 38 | 94750 | 68546 | 69241 | MCA101853 | g1788164 | 3.00E−16 | putative adhesin |
| 38 | 94750 | 34301 | 34576 | MCA101890 | | | |
| 38 | 94750 | 35674 | 36312 | MCA101892 | | | |
| 38 | 94750 | 87827 | 89506 | MCA101940 | g409365 | 0 | urocanase |
| 38 | 94750 | 89601 | 91106 | MCA101941 | g151274 | e−164 | histidine ammonialyase |
| | | | | | | | (hutH) precursor |
| | | | | | | | (gtg start codon (E. C. |
| | | | | | | | 4.3.1.3) |
| 38 | 94750 | 91634 | 92272 | MCA101942 | g149204 | 5.00E−35 | histidine utilization |
| | | | | | | | repressor G |
| 38 | 94750 | 92575 | 93723 | MCA101946 | g4106576 | e−109 | ORF9, highly similar |
| | | | | | | | to imidazolone |
| | | | | | | | propionate hydrolase |
| 38 | 94750 | 15658 | 16503 | MCA101947 | g2285919 | 1.00E−13 | K5L + K6L |
| 38 | 94750 | 6816 | 7307 | MCA101948 | g1321618 | 6.00E−16 | |
| 38 | 94750 | 80209 | 81537 | MCA101953 | g3402275 | 1.00E−51 | EnvZ protein |
| 38 | 94750 | 85007 | 87612 | MCA101955 | g2367097 | 0 | aconitate hydrase B |
| 39 | 100848 | 79190 | 79684 | MCA100004 | g1835603 | 1.00E−30 | 15 kDa protein |
| 39 | 100848 | 77575 | 78220 | MCA100013 | g49095 | 2.00E−47 | triosephosphate |
| | | | | | | | isomerase |
| 39 | 100848 | 33560 | 34450 | MCA100033 | g1786984 | 3.00E−38 | putative |
| | | | | | | | transcriptional |
| | | | | | | | regulator LYSR-type |
| 39 | 100848 | 16050 | 17411 | MCA100152 | g154205 | e−139 | phosphomannomutase |
| 39 | 100848 | 38007 | 39128 | MCA100236 | g1574558 | 2.00E−27 | conserved hypothetical |
| | | | | | | | protein |
| 39 | 100848 | 39149 | 40258 | MCA100237 | g1790713 | 7.00E−15 | orf, hypothetical |
| | | | | | | | protein |
| 39 | 100848 | 13324 | 14526 | MCA100260 | g1788092 | 4.00E−39 | putative amino |
| | | | | | | | acid/amine transport |
| | | | | | | | protein |
| 39 | 100848 | 14586 | 15035 | MCA100261 | | | |
| 39 | 100848 | 15091 | 15930 | MCA100262 | g1773171 | 4.00E−38 | similar to M. |
| | | | | | | | tuberculosis |
| | | | | | | | MTCY277.09 |
| 39 | 100848 | 36123 | 37547 | MCA100305 | g2984771 | e−101 | PhpA |
| 39 | 100848 | 34625 | 35815 | MCA100306 | g409800 | e−132 | tyrosine |
| | | | | | | | aminotransferase |
| 39 | 100848 | 89115 | 89381 | MCA100389 | g429056 | 1.00E−26 | ribosomal protein S15 |
| 39 | 100848 | 89607 | 91682 | MCA100390 | g3650364 | 0 | polyribonucleotide |
| | | | | | | | nucleotidyltransferase |
| 39 | 100848 | 91827 | 92300 | MCA100391 | g2959336 | 4.00E−46 | hypothetical protein |
| 39 | 100848 | 92532 | 92957 | MCA100392 | g1100876 | 5.00E−19 | hypothetical OrfY |
| 39 | 100848 | 92969 | 93382 | MCA100393 | g1789538 | 2.00E−08 | orf, hypothetical |
| | | | | | | | protein |
| 39 | 100848 | 93467 | 94066 | MCA100394 | g1789540 | 1.00E−06 | putative periplasmic |
| | | | | | | | protein |
| 39 | 100848 | 28411 | 29109 | MCA100525 | g41638 | 3.00E−64 | PufX protein |
| 39 | 100848 | 30030 | 30761 | MCA100527 | g1742082 | 8.00E−54 | Internalin B |
| 39 | 100848 | 30895 | 32214 | MCA100528 | g537059 | e−129 | ORF_f447 |
| 39 | 100848 | 32302 | 33378 | MCA100529 | g2916960 | 2.00E−46 | chaA |
| 39 | 100848 | 94363 | 94614 | MCA100761 | g415661 | 4.00E−14 | putative; ORF3 |
| 39 | 100848 | 94621 | 95874 | MCA100762 | g415662 | e−141 | UDP-N- |
| | | | | | | | acetylglucosamine 1- |
| | | | | | | | carboxyvinyl |
| | | | | | | | transferase |
| 39 | 100848 | 95992 | 96555 | MCA100763 | g2636005 | 8.00E−43 | ATP |
| | | | | | | | phosphoribosyltransferase |
| 39 | 100848 | 96820 | 98121 | MCA100764 | g2983343 | e−101 | histidinol |
| | | | | | | | dehydrogenase |
| 39 | 100848 | 98225 | 99295 | MCA100765 | g440346 | 3.00E−99 | histidinol phosphate |
| | | | | | | | aminotransferase |
| 39 | 100848 | 99499 | 100359 | MCA100766 | g2984079 | 1.00E−41 | fumarate hydratase |
| | | | | | | | (fumarase) |
| 39 | 100848 | 79796 | 81271 | MCA100801 | g1789560 | e−128 | transcription pausing; |
| | | | | | | | L factor |
| 39 | 100848 | 81439 | 84168 | MCA100802 | g3850831 | 0 | initiation factor IF2- |
| | | | | | | | alpha |
| 39 | 100848 | 86548 | 86931 | MCA100804 | g606107 | 2.00E−17 | P15B |
| 39 | 100848 | 86964 | 87845 | MCA100805 | g1574748 | 2.00E−54 | tRNA pseudouridine 55 |
| | | | | | | | synthase (truB) |
| 39 | 100848 | 67997 | 69420 | MCA100815 | g717082 | e−139 | glutamyl-tRNA |
| | | | | | | | synthetase |
| 39 | 100848 | 69744 | 70682 | MCA100816 | g42318 | 8.00E−73 | orfB |
| 39 | 100848 | 70742 | 71092 | MCA100817 | | | |
| 39 | 100848 | 71246 | 73027 | MCA100818 | g840842 | 2.00E−81 | penicillin-binding |
| | | | | | | | protein 3 |
| 39 | 100848 | 73207 | 74637 | MCA100819 | g1574688 | 2.00E−74 | UDP-N-acetylmuramyl- |
| | | | | | | | tripeptide synthetase |
| | | | | | | | (murE) |
| 39 | 100848 | 74755 | 76140 | MCA100820 | g1786274 | 9.00E−76 | D-alanine: D-alanine- |
| | | | | | | | adding enzyme |
| 39 | 100848 | 76209 | 77270 | MCA100821 | g1574690 | e−105 | phospho-N- |
| | | | | | | | acetylmuramoyl- |
| | | | | | | | pentapeptide- |
| | | | | | | | transferase E |
| 39 | 100848 | 18959 | 19780 | MCA100862 | g1789144 | 2.00E−46 | orf, hypothetical |
| | | | | | | | protein |
| 39 | 100848 | 19920 | 20072 | MCA100863 | g973208 | 4.00E−09 | unknown |
| 39 | 100848 | 20368 | 21621 | MCA100864 | g3650360 | 3.00E−58 | polynucleotide |
| | | | | | | | adenylyltransferase |
| 39 | 100848 | 22089 | 22535 | MCA100865 | g1573012 | 4.00E−30 | 2-amino-4-hydroxy-6- |
| | | | | | | | hydroxymethyldihydropteridine- |
| | | | | | | | pyroph |
| 39 | 100848 | 22769 | 23563 | MCA100866 | g3970812 | 2.00E−74 | 3-methyl-2- |
| | | | | | | | oxobutanoate |
| | | | | | | | hydroxymethyltransferase |
| 39 | 100848 | 23576 | 24412 | MCA100867 | g854607 | 2.00E−64 | putative pantoate — |
| | | | | | | | beta-alanine ligase |
| 39 | 100848 | 24556 | 25401 | MCA100868 | g4138364 | 3.00E−59 | ORF284 |
| 39 | 100848 | 25460 | 26035 | MCA100869 | g4467403 | 2.00E−23 | hsdS protein (AA 1-410 |
| 39 | 100848 | 26235 | 26776 | MCA100870 | g4155604 | 4.00E−16 | putative |
| 39 | 100848 | 29173 | 29787 | MCA100902 | g606319 | 7.00E−20 | 27 kD protein in |
| | | | | | | | ECDAMOPRA |
| 39 | 100848 | 155 | 772 | MCA100959 | | | |
| 39 | 100848 | 787 | 1221 | MCA100960 | | | |
| 39 | 100848 | 2287 | 2865 | MCA100962 | g1789409 | 3.00E−18 | orf, hypothetical |
| | | | | | | | protein |
| 39 | 100848 | 3088 | 4974 | MCA100963 | g4176381 | 0 | topoisomerase IV |
| | | | | | | | subunit |
| 39 | 100848 | 5074 | 5685 | MCA100964 | g2622643 | 3.00E−33 | imidazoleglycerol- |
| | | | | | | | phosphate synthase |
| 39 | 100848 | 5692 | 6273 | MCA100965 | g38667 | 3.00E−57 | hisB |
| 39 | 100848 | 6509 | 7017 | MCA100966 | g41474 | 2.00E−43 | fms |
| 39 | 100848 | 7147 | 8805 | MCA100967 | g1800021 | 2.00E−69 | DNA repair protein |
| | | | | | | | RecN |
| 39 | 100848 | 8859 | 9404 | MCA100968 | g1789317 | 1.00E−30 | orf, hypothetical |
| | | | | | | | protein |
| 39 | 100848 | 9428 | 9826 | MCA100969 | g1789318 | 1.00E−23 | orf, hypothetical |
| | | | | | | | protein |
| 39 | 100848 | 9901 | 10368 | MCA100970 | | | |
| 39 | 100848 | 10483 | 10698 | MCA100971 | g1789881 | 1.00E−15 | orf, hypothetical |
| | | | | | | | protein |
| 39 | 100848 | 10775 | 11650 | MCA100972 | g2645800 | 3.00E−62 | site-specific |
| | | | | | | | recombinase |
| 39 | 100848 | 17947 | 18870 | MCA100983 | g1781241 | 1.00E−99 | cysK |
| 39 | 100848 | 27386 | 27973 | MCA100985 | g1814074 | 1.00E−34 | DsbA |
| 39 | 100848 | 40307 | 41437 | MCA101057 | g1657573 | 3.00E−49 | hypothetical protein |
| 39 | 100848 | 41491 | 41649 | MCA101058 | | | |
| 39 | 100848 | 41663 | 42544 | MCA101059 | g1773136 | 2.00E−52 | acyl-coA thioesterase |
| | | | | | | | II |
| 39 | 100848 | 42892 | 45303 | MCA101060 | g1573755 | e−124 | glycerol-3-phosphate |
| | | | | | | | acyltransferase (plsB) |
| 39 | 100848 | 45434 | 46276 | MCA101061 | g3372537 | 1.00E−61 | UTP-glucose-1- |
| | | | | | | | phosphate |
| | | | | | | | uridylyltransferase |
| 39 | 100848 | 46369 | 47937 | MCA101062 | g927386 | e−163 | glucose-6-phosphate |
| | | | | | | | isomerase |
| 39 | 100848 | 48368 | 48901 | MCA101063 | g3559950 | 1.00E−20 | UDP-glucose 6- |
| | | | | | | | dehydrogenase |
| 39 | 100848 | 49598 | 49843 | MCA101064 | | | |
| 39 | 100848 | 50331 | 50846 | MCA101065 | | | |
| 39 | 100848 | 64882 | 65763 | MCA101402 | g2661442 | 4.00E−80 | YafJ |
| 39 | 100848 | 62805 | 63572 | MCA101404 | g38674 | 2.00E−91 | cyclase |
| 39 | 100848 | 62144 | 62566 | MCA101405 | g1773099 | 2.00E−42 | probable riboflavin |
| | | | | | | | synthase beta chain |
| 39 | 100848 | 61547 | 61969 | MCA101406 | g1574763 | 4.00E−17 | N utilization |
| | | | | | | | substance protein B |
| | | | | | | | (nusB) |
| 39 | 100848 | 60480 | 61445 | MCA101407 | g2329840 | 1.00E−50 | thiamine-monophosphate |
| | | | | | | | kinase |
| 39 | 100848 | 59736 | 60230 | MCA101408 | g1574765 | 4.00E−19 | phosphatidylglycerophosphatase |
| | | | | | | | A (pgpA) |
| 39 | 100848 | 58735 | 59224 | MCA101410 | g2769574 | 4.00E−22 | methylase |
| 39 | 100848 | 56628 | 57614 | MCA101412 | g580766 | 1.00E−54 | BepI modification |
| | | | | | | | methylase (AA 1-403) |
| 39 | 100848 | 54681 | 55580 | MCA101414 | g1573822 | 8.00E−37 | conserved hypothetical |
| | | | | | | | protein |
| 39 | 100848 | 52655 | 54490 | MCA101415 | g2654003 | 0 | glucosamine synthase |
| 39 | 100848 | 51555 | 52574 | MCA101416 | g1429254 | e−111 | UDP-glucose 4- |
| | | | | | | | epimerase |
| 39 | 100848 | 11886 | 13143 | MCA101479 | g1787337 | e−109 | 3-oxoacyl-[acyl- |
| | | | | | | | carrier-protein] |
| | | | | | | | synthase II |
| 39 | 100848 | 88447 | 88902 | MCA101792 | g940802 | 1.00E−15 | outer membrane protein |
| 39 | 100848 | 93930 | 94229 | MCA101810 | | | |
| 39 | 100848 | 50855 | 51313 | MCA101869 | | | |
| 39 | 100848 | 56357 | 56563 | MCA101870 | | | |
| 39 | 100848 | 63863 | 64879 | MCA101871 | g3089616 | 4.00E−13 | homoserine kinase |
| | | | | | | | homolog |
| 39 | 100848 | 65763 | 66659 | MCA101872 | | | |
| 39 | 100848 | 78259 | 78561 | MCA102126 | | | |
| 4 | 2642 | 463 | 783 | MCA100115 | g290546 | 1.00E−07 | f135 |
| 4 | 2642 | 954 | 1610 | MCA100117 | g2960085 | 3.00E−15 | hypothetical protein |
| | | | | | | | Rv3661 |
| 4 | 2642 | 1764 | 2642 | MCA101198 | g154276 | 8.00E−96 | peptide chain release |
| | | | | | | | factor 2 |
| 40 | 119211 | 50160 | 50753 | MCA100057 | g4062767 | 2.00E−34 | ZK688.3 protein |
| 40 | 119211 | 50865 | 51788 | MCA100058 | g1359474 | 1.00E−81 | homology to hydrolases |
| 40 | 119211 | 51852 | 52013 | MCA100059 | g599606 | 5.00E−24 | rubredoxin |
| 40 | 119211 | 8413 | 8958 | MCA100065 | g4337446 | 1.00E−58 | ECORLD_ORF1; encoded |
| | | | | | | | by M30388 and Z29635 |
| 40 | 119211 | 10888 | 11190 | MCA100146 | g1573418 | 2.00E−24 | conserved hypothetical |
| | | | | | | | protein |
| 40 | 119211 | 10282 | 10866 | MCA100147 | g1573419 | 2.00E−46 | recombination protein |
| | | | | | | | (recR) |
| 40 | 119211 | 9069 | 10181 | MCA100148 | g1788105 | 6.00E−35 | RNase D, processes |
| | | | | | | | tRNA precursor |
| 40 | 119211 | 106 | 690 | MCA100179 | g3861026 | 1.00E−13 | unknown |
| 40 | 119211 | 693 | 1781 | MCA100180 | g606171 | 6.00E−92 | ORF_f375 |
| 40 | 119211 | 1850 | 2371 | MCA100181 | g1742876 | 3.00E−28 | ORF_ID: o329#2; similar |
| | | | | | | | to [A40360] |
| 40 | 119211 | 2693 | 3697 | MCA100182 | g2634701 | 1.00E−61 | NAD (P) H-dependent |
| | | | | | | | glycerol-3-phosphate |
| | | | | | | | dehydrogenase |
| 40 | 119211 | 7778 | 8185 | MCA100367 | g145892 | 2.00E−18 | biotin carboxyl |
| | | | | | | | carrier protein |
| 40 | 119211 | 6422 | 7750 | MCA100368 | g405541 | e−152 | biotin carboxylase |
| 40 | 119211 | 5139 | 6181 | MCA100369 | g1786881 | 2.00E−94 | putative ATP-binding |
| | | | | | | | protein in pho regulon |
| 40 | 119211 | 4544 | 4891 | MCA100370 | g1786880 | 4.00E−13 | orf, hypothetical |
| | | | | | | | protein |
| 40 | 119211 | 27651 | 28547 | MCA100431 | g151405 | e−111 | phaseolotoxin |
| | | | | | | | sensitive octase |
| 40 | 119211 | 26345 | 26839 | MCA100433 | g2632225 | 9.00E−15 | YkuD protein |
| 40 | 119211 | 76550 | 76939 | MCA100482 | g304913 | 3.00E−26 | urf2 |
| 40 | 119211 | 114141 | 114743 | MCA100510 | g286176 | 7.00E−28 | negative regulator of |
| | | | | | | | pyocin genes |
| 40 | 119211 | 115659 | 116633 | MCA100512 | | | |
| 40 | 119211 | 116611 | 117456 | MCA100513 | | | |
| 40 | 119211 | 117460 | 118032 | MCA100514 | | | |
| 40 | 119211 | 22301 | 24235 | MCA100948 | g1574757 | e−143 | ABC transporter, ATP- |
| | | | | | | | binding protein |
| 40 | 119211 | 21230 | 22201 | MCA100949 | g1872207 | 2.00E−35 | HtrB homolog |
| 40 | 119211 | 20793 | 21170 | MCA100950 | g2634659 | 4.00E−42 | aspartate 1- |
| | | | | | | | decarboxylase |
| 40 | 119211 | 17870 | 18673 | MCA100952 | g1052830 | 6.00E−63 | indoleglycerol |
| | | | | | | | phosphate synthetase |
| 40 | 119211 | 16782 | 17798 | MCA100953 | g143784 | 3.00E−42 | tryptophanyl tRNA |
| | | | | | | | synthetase (EC |
| | | | | | | | 6.1.1.2) |
| 40 | 119211 | 15955 | 16656 | MCA100954 | g410131 | 8.00E−22 | ORFX7 |
| 40 | 119211 | 15289 | 15762 | MCA100955 | g410132 | 3.00E−14 | ORFX8 |
| 40 | 119211 | 14182 | 15102 | MCA100956 | g1574128 | 5.00E−73 | conserved hypothetical |
| | | | | | | | protein |
| 40 | 119211 | 77032 | 77787 | MCA101016 | g1573017 | 1.00E−50 | tRNA delta(2)- |
| | | | | | | | isopentenylpyrophosphate |
| | | | | | | | transferase |
| 40 | 119211 | 78161 | 78421 | MCA101017 | g1065627 | 3.00E−30 | yersinia multiple |
| | | | | | | | regulator |
| 40 | 119211 | 78982 | 79953 | MCA101019 | g1789588 | 4.00E−68 | putative isomerase |
| 40 | 119211 | 80020 | 80511 | MCA101020 | g2367202 | 6.00E−33 | orf, hypothetical |
| | | | | | | | protein |
| 40 | 119211 | 80545 | 81120 | MCA101021 | | | |
| 40 | 119211 | 81173 | 81667 | MCA101023 | g606139 | 6.00E−15 | ORF_o185 |
| 40 | 119211 | 81698 | 82408 | MCA101024 | g2317737 | 3.00E−87 | putative ABC |
| | | | | | | | transporter ATP- |
| | | | | | | | binding protein |
| 40 | 119211 | 82528 | 86061 | MCA101025 | g2766693 | 0 | proline dehydrogenase |
| 40 | 119211 | 88029 | 89999 | MCA101028 | g1161059 | 3.00E−57 | protease |
| 40 | 119211 | 90522 | 92645 | MCA101031 | | | |
| 40 | 119211 | 60578 | 62242 | MCA101150 | g1574163 | e−112 | dihydrolipoamide |
| | | | | | | | acetyltransferase |
| | | | | | | | (aceF) |
| 40 | 119211 | 48773 | 50050 | MCA101214 | g154288 | e−142 | 5- |
| | | | | | | | phosphoribosylglycinamide |
| | | | | | | | synthetase |
| 40 | 119211 | 47317 | 48624 | MCA101215 | g3087737 | 9.00E−44 | ABC1 protein |
| 40 | 119211 | 44031 | 44555 | MCA101218 | g1573090 | 1.00E−48 | DNA polymerase III, |
| | | | | | | | epsilon subunit (dnaQ) |
| 40 | 119211 | 43024 | 43593 | MCA101220 | g396335 | 3.00E−37 | No definition line |
| | | | | | | | found |
| 40 | 119211 | 42522 | 42941 | MCA101221 | g1742695 | 3.00E−34 | Ferredoxin II. |
| 40 | 119211 | 40605 | 40901 | MCA101223 | g1787504 | 7.00E−22 | orf, hypothetical |
| | | | | | | | protein |
| 40 | 119211 | 38672 | 40519 | MCA101224 | g1799717 | 7.00E−74 | similar to [SwissProt |
| | | | | | | | Accession Number |
| | | | | | | | P44246] |
| 40 | 119211 | 37107 | 37787 | MCA101226 | g3861231 | 6.00E−49 | unknown |
| 40 | 119211 | 114989 | 115282 | MCA101355 | | | |
| 40 | 119211 | 92788 | 93711 | MCA101469 | g1573776 | e−104 | cell division protein |
| | | | | | | | (ftsY) |
| 40 | 119211 | 93897 | 94241 | MCA101470 | g2313803 | 2.00E−27 | methylated-DNA - |
| | | | | | | | protein-cysteine |
| | | | | | | | methyltransferase |
| 40 | 119211 | 94362 | 95357 | MCA101471 | g47870 | 2.00E−94 | dihydroorotate oxidase |
| 40 | 119211 | 95392 | 95904 | MCA101472 | | | |
| 40 | 119211 | 95970 | 97439 | MCA101473 | g1788651 | e−171 | amidophosphoribosyltransferase = PRPP |
| | | | | | | | amidotransferase |
| 40 | 119211 | 97996 | 98835 | MCA101475 | g1944158 | 5.00E−36 | lytic transglycosylase |
| 40 | 119211 | 99306 | 101294 | MCA101476 | g1592818 | 0 | uvrB |
| 40 | 119211 | 101328 | 101969 | MCA101477 | | | |
| 40 | 119211 | 102078 | 105977 | MCA101480 | g1574781 | 2.00E−44 | exodeoxyribonuclease |
| | | | | | | | V, beta chain (recB) |
| 40 | 119211 | 106602 | 108041 | MCA101482 | g3142727 | 3.00E−49 | exodeoxyribonuclease V |
| | | | | | | | subunit |
| 40 | 119211 | 108251 | 109219 | MCA101483 | g3885440 | 1.00E−86 | yhdG homolog |
| 40 | 119211 | 109659 | 110585 | MCA101484 | g148275 | 5.00E−16 | Exonuclease VII large |
| | | | | | | | subunit |
| 40 | 119211 | 111005 | 111736 | MCA101485 | g2072699 | 4.00E−74 | pvdS |
| 40 | 119211 | 118395 | 118646 | MCA101541 | | | |
| 40 | 119211 | 118082 | 118393 | MCA101543 | | | |
| 40 | 119211 | 52375 | 53448 | MCA101589 | g151446 | e−112 | P-protein |
| 40 | 119211 | 53505 | 54374 | MCA101590 | g410055 | 2.00E−43 | cyclohexadienyl |
| | | | | | | | dehydrogenase |
| 40 | 119211 | 54495 | 55763 | MCA101591 | g2634678 | e−101 | 5- |
| | | | | | | | enolpyruvoylshikimate- |
| | | | | | | | 3-phosphate synthase |
| 40 | 119211 | 55862 | 56695 | MCA101592 | g1906367 | 4.00E−64 | hypothetical protein |
| 40 | 119211 | 56723 | 57088 | MCA101593 | g1789438 | 1.00E−10 | putative kinase |
| 40 | 119211 | 57079 | 57510 | MCA101594 | | | |
| 40 | 119211 | 57818 | 60442 | MCA101595 | g2564217 | 0 | pyruvate dehydrogenase |
| | | | | | | | (lipoamide) |
| 40 | 119211 | 62595 | 63365 | MCA101597 | g1789363 | 4.00E−78 | orf, hypothetical |
| | | | | | | | protein |
| 40 | 119211 | 67710 | 68651 | MCA101599 | g1788765 | 7.00E−77 | thiosulfate binding |
| | | | | | | | protein |
| 40 | 119211 | 69040 | 70197 | MCA101600 | g3978474 | e−115 | MetZ homolog |
| 40 | 119211 | 70448 | 71575 | MCA101601 | g1574510 | e−157 | ribonucleoside |
| | | | | | | | diphosphate reductase, |
| | | | | | | | beta chain (nrdB) |
| 40 | 119211 | 71681 | 71902 | MCA101602 | g1788568 | 2.00E−08 | orf, hypothetical |
| | | | | | | | protein |
| 40 | 119211 | 73244 | 74389 | MCA101604 | g498170 | 3.00E−87 | carboxynorspermidine |
| | | | | | | | decarboxylase |
| 40 | 119211 | 74602 | 75804 | MCA101605 | g1001125 | 3.00E−74 | hypothetical protein |
| 40 | 119211 | 75957 | 76511 | MCA101606 | g4155434 | 7.00E−36 | putative |
| 40 | 119211 | 112492 | 112878 | MCA101770 | | | |
| 40 | 119211 | 112942 | 113109 | MCA101771 | | | |
| 40 | 119211 | 118691 | 119050 | MCA101772 | | | |
| 40 | 119211 | 119052 | 119211 | MCA101774 | | | |
| 40 | 119211 | 18727 | 20568 | MCA101814 | g141801 | 1.00E−83 | anthranilate |
| | | | | | | | phosphoribosyltransferase |
| | | | | | | | (EC 2.4.2.18) |
| 40 | 119211 | 11382 | 13633 | MCA101815 | g1799581 | 0 | ribonucleoside- |
| | | | | | | | diphosphate reductase |
| | | | | | | | 1 alpha (EC1.17.4.1) |
| 40 | 119211 | 63531 | 66164 | MCA101886 | g1573962 | 2.00E−39 | exodeoxyribonuclease |
| | | | | | | | V, gamma chain (recC) |
| 40 | 119211 | 44757 | 45182 | MCA101959 | g1552784 | 1.00E−34 | ribonuclease H |
| 40 | 119211 | 45397 | 45936 | MCA101960 | g3861372 | 2.00E−09 | possible |
| | | | | | | | protoporphyrinogen |
| | | | | | | | oxidase (hemk) |
| 40 | 119211 | 46032 | 47180 | MCA101961 | g2293312 | 3.00E−21 | YtfP |
| 40 | 119211 | 24876 | 26252 | MCA101962 | g598251 | 0 | outer membrane protein E |
| 40 | 119211 | 29114 | 29992 | MCA101964 | g2983572 | 5.00E−19 | 3-oxoacyl-[acyl- |
| | | | | | | | carrier-protein] |
| | | | | | | | synthase III |
| 40 | 119211 | 31377 | 32036 | MCA101965 | g580875 | 3.00E−59 | ipa-57d |
| 40 | 119211 | 32139 | 32588 | MCA101967 | g1788911 | 3.00E−35 | putative deaminase |
| 40 | 119211 | 32677 | 33342 | MCA101968 | g1574149 | 2.00E−50 | cytidylate kinase 1 |
| | | | | | | | (cmkA) |
| 40 | 119211 | 33597 | 35186 | MCA101969 | g1651439 | 0 | 30S ribosomal protein |
| | | | | | | | S1. |
| 40 | 119211 | 35506 | 35781 | MCA101970 | g399670 | 2.00E−16 | integration host |
| | | | | | | | factor beta subunit |
| 40 | 119211 | 36355 | 37032 | MCA101971 | g805068 | 6.00E−56 | OMP decarboxylase |
| 40 | 119211 | 37969 | 38598 | MCA101972 | g2635898 | 2.00E−17 | similar to |
| | | | | | | | hypothetical proteins |
| 40 | 119211 | 86419 | 87177 | MCA102059 | | | |
| 40 | 119211 | 3811 | 4308 | MCA102109 | g1001123 | 6.00E−08 | hypothetical protein |
| 40 | 119211 | 24430 | 24660 | MCA102111 | | | |
| 40 | 119211 | 35812 | 36213 | MCA102116 | | | |
| 40 | 119211 | 30377 | 31330 | MCA102117 | | | |
| 41 | 269223 | 188318 | 189049 | MCA100014 | g2181957 | 5.00E−43 | hypothetical protein |
| | | | | | | | Rv3300c |
| 41 | 269223 | 77773 | 79113 | MCA100035 | g149757 | 0 | outer membrane protein |
| | | | | | | | CD |
| 41 | 269223 | 255725 | 256996 | MCA100036 | g882710 | e−118 | N-acetylglutamate |
| | | | | | | | synthase |
| 41 | 269223 | 1764 | 2576 | MCA100054 | g1573276 | 2.00E−46 | pyrroline-5- |
| | | | | | | | carboxylate reductase |
| | | | | | | | (proC) |
| 41 | 269223 | 195583 | 196011 | MCA100074 | g1001829 | 4.00E−15 | hypothetical protein |
| 41 | 269223 | 82057 | 82719 | MCA100076 | g987642 | 5.00E−49 | ribonuclease III |
| 41 | 269223 | 79399 | 80121 | MCA100078 | g1788917 | 1.00E−61 | pyridoxine |
| | | | | | | | biosynthesis |
| 41 | 269223 | 127128 | 128444 | MCA100098 | g407186 | 3.00E−75 | DnaA protein |
| 41 | 269223 | 192138 | 192839 | MCA100103 | g2108342 | 1.00E−89 | OmpR protein |
| 41 | 269223 | 191142 | 192041 | MCA100104 | g1788499 | 6.00E−42 | orf, hypothetical |
| | | | | | | | protein |
| 41 | 269223 | 126337 | 126468 | MCA100112 | g147682 | 7.00E−16 | ribosomal protein L34 |
| 41 | 269223 | 125896 | 126168 | MCA100113 | g581462 | 2.00E−13 | homologous to E. coli |
| | | | | | | | rnpA |
| 41 | 269223 | 125582 | 125788 | MCA100114 | g2898108 | 2.00E−15 | 9-10 kDa protein-like |
| 41 | 269223 | 193168 | 195417 | MCA100121 | g1098475 | e−171 | region E; orf; |
| | | | | | | | homologous to E. coli |
| | | | | | | | o622, U18997 |
| 41 | 269223 | 254370 | 255644 | MCA100131 | g1574371 | e−100 | glutamate permease |
| | | | | | | | (gltS) |
| 41 | 269223 | 4189 | 4955 | MCA100190 | g147322 | 2.00E−77 | acetyl-CoA carboxylase |
| 41 | 269223 | 41968 | 43620 | MCA100198 | g2367384 | 0 | putative ATP-binding |
| | | | | | | | component of a |
| | | | | | | | transport system |
| 41 | 269223 | 40805 | 41419 | MCA100200 | g2231726 | 2.00E−41 | macrophage infectivity |
| | | | | | | | potentiator |
| 41 | 269223 | 189796 | 190944 | MCA100247 | g1789473 | e−107 | putative transport |
| | | | | | | | protein |
| 41 | 269223 | 185949 | 186641 | MCA100307 | g1574175 | 3.00E−48 | 16s pseudouridylate |
| | | | | | | | 516 synthase (rsuA) |
| 41 | 269223 | 184967 | 185572 | MCA100308 | g3135321 | 5.00E−12 | putative |
| | | | | | | | thiol: disulfide |
| | | | | | | | interchange protein |
| | | | | | | | precursor |
| 41 | 269223 | 183536 | 184672 | MCA100309 | g1389759 | 2.00E−94 | DnaJ |
| 41 | 269223 | 37916 | 38281 | MCA100355 | g3323226 | 2.00E−21 | T. pallidum predicted |
| | | | | | | | coding region TP0895 |
| 41 | 269223 | 227863 | 230013 | MCA100365 | g391839 | 0 | alpha-subunit of HDT |
| 41 | 269223 | 230052 | 231215 | MCA100366 | g391840 | e−146 | beta-subunit of HDT |
| 41 | 269223 | 36803 | 37561 | MCA100439 | g1468939 | 7.00E−60 | meso-2,3-butanediol |
| | | | | | | | dehydrogenase (D- |
| | | | | | | | acetoin forming) |
| 41 | 269223 | 34942 | 36237 | MCA100441 | g1657503 | e−106 | similar to S. aureus |
| | | | | | | | mercury (II) reductase |
| 41 | 269223 | 33813 | 34805 | MCA100442 | g1001812 | 4.00E−72 | hypothetical protein |
| 41 | 269223 | 32952 | 33533 | MCA100443 | g1789819 | 2.00E−49 | orf, hypothetical |
| | | | | | | | protein |
| 41 | 269223 | 164675 | 165019 | MCA100454 | g2635307 | 3.00E−08 | ysmA |
| 41 | 269223 | 94670 | 95482 | MCA100483 | g1573330 | e−120 | iron (chelated) ABC |
| | | | | | | | transporter, |
| | | | | | | | periplasmic-binding |
| | | | | | | | prot |
| 41 | 269223 | 95485 | 96356 | MCA100484 | g1573329 | e−115 | iron (chelated) ABC |
| | | | | | | | transporter, ATP- |
| | | | | | | | binding prot (yfeB) |
| 41 | 269223 | 96387 | 97214 | MCA100485 | g1573328 | e−100 | iron (chelated) ABC |
| | | | | | | | transporter, permease |
| | | | | | | | prot (yfeC) |
| 41 | 269223 | 97272 | 98081 | MCA100486 | g1245467 | 1.00E−87 | YfeD |
| 41 | 269223 | 231781 | 232396 | MCA100534 | g2340007 | 1.00E−28 | YlbK protein |
| 41 | 269223 | 233066 | 233581 | MCA100536 | g2342534 | 8.00E−45 | PAPS reductase |
| 41 | 269223 | 233689 | 234591 | MCA100537 | g1322409 | 9.00E−89 | cysD |
| 41 | 269223 | 234772 | 236025 | MCA100538 | g1322410 | e−100 | cysN |
| 41 | 269223 | 236187 | 238250 | MCA100539 | g2367254 | 0 | DNA helicase |
| 41 | 269223 | 66114 | 68632 | MCA100556 | g1574437 | e−153 | cell division protein |
| | | | | | | | FtsK-related protein |
| 41 | 269223 | 69114 | 69851 | MCA100558 | g2668599 | 2.00E−78 | ATPase |
| 41 | 269223 | 70011 | 70676 | MCA100559 | g1787088 | 8.00E−34 | arginine 3rd transport |
| | | | | | | | system periplasmic |
| | | | | | | | binding prot |
| 41 | 269223 | 70868 | 71533 | MCA100560 | g769794 | 2.00E−40 | artJ |
| 41 | 269223 | 75715 | 77502 | MCA100597 | g1790302 | 0 | putative GTP-binding |
| | | | | | | | factor |
| 41 | 269223 | 74090 | 75439 | MCA100598 | g1573640 | e−127 | UDP-N- |
| | | | | | | | acetylglucosamine |
| | | | | | | | pyrophosphorylase |
| | | | | | | | (glmU) |
| 41 | 269223 | 73356 | 74006 | MCA100599 | g496542 | 1.00E−48 | OccM |
| 41 | 269223 | 71723 | 73317 | MCA100600 | g1787085 | 1.00E−36 | arginine 3rd transport |
| | | | | | | | system periplasmic |
| | | | | | | | binding prot |
| 41 | 269223 | 2850 | 4010 | MCA100637 | g971394 | 6.00E−27 | similar to Acc. No. |
| | | | | | | | D26185 |
| 41 | 269223 | 176444 | 178372 | MCA100657 | g606286 | e−158 | ORF_o637 |
| 41 | 269223 | 179340 | 180227 | MCA100659 | g1789752 | 5.00E−45 | orf, hypothetical |
| | | | | | | | protein |
| 41 | 269223 | 180371 | 181150 | MCA100660 | g1185002 | 2.00E−47 | dihydrodipicolinate |
| | | | | | | | reductase |
| 41 | 269223 | 181240 | 182331 | MCA100661 | g304266 | 1.00E−45 | cystathionine beta- |
| | | | | | | | lyase |
| 41 | 269223 | 182445 | 183365 | MCA100662 | g2634328 | 3.00E−89 | similar to sodium- |
| | | | | | | | dependent transporter |
| 41 | 269223 | 178416 | 179237 | MCA100692 | g2293347 | 2.00E−12 | DnaJ |
| 41 | 269223 | 39931 | 40560 | MCA100773 | g451652 | 1.00E−45 | unknown |
| 41 | 269223 | 244876 | 245628 | MCA101070 | g4186118 | 2.00E−24 | type 4 prepilin |
| | | | | | | | peptidase |
| 41 | 269223 | 303 | 1001 | MCA101092 | g4155349 | 1.00E−27 | phosphomethylpyrimidine |
| | | | | | | | kinase |
| 41 | 269223 | 129669 | 130736 | MCA101112 | g150880 | 2.00E−37 | putative |
| 41 | 269223 | 82887 | 83588 | MCA101125 | g1788921 | 8.00E−43 | leader peptidase |
| | | | | | | | (signal peptidase I) |
| 41 | 269223 | 111855 | 112940 | MCA101128 | g150708 | 1.00E−99 | [ribB] gene products |
| 41 | 269223 | 268513 | 268884 | MCA101181 | g1224005 | 7.00E−40 | ORF2; sim. to N- |
| | | | | | | | terminal |
| | | | | | | | phosphoribosyl c-AMP |
| | | | | | | | hydrolase |
| 41 | 269223 | 268096 | 268443 | MCA101182 | g1224006 | 6.00E−28 | ORF3; sim. to C- |
| | | | | | | | terminal |
| | | | | | | | phosphoribosyl c-AMP |
| | | | | | | | hydrolase |
| 41 | 269223 | 267596 | 268026 | MCA101183 | g1224007 | 2.00E−18 | ORF4 |
| 41 | 269223 | 266565 | 267230 | MCA101184 | g1224008 | 3.00E−59 | ORF5; mutations in |
| | | | | | | | this gene affect the |
| | | | | | | | culture pH |
| 41 | 269223 | 264696 | 266135 | MCA101185 | g2577963 | 5.00E−86 | YerD protein |
| 41 | 269223 | 263394 | 264128 | MCA101187 | g149205 | 6.00E−36 | histidine utilization |
| | | | | | | | repressor C (hutC) |
| 41 | 269223 | 260788 | 261690 | MCA101189 | g1573236 | 8.00E−61 | conserved hypothetical |
| | | | | | | | protein |
| 41 | 269223 | 259547 | 260607 | MCA101190 | g413953 | 1.00E−87 | ipa-29d |
| 41 | 269223 | 258434 | 259207 | MCA101191 | g413952 | 4.00E−45 | ipa-28d |
| 41 | 269223 | 44402 | 44662 | MCA101279 | | | |
| 41 | 269223 | 45635 | 47095 | MCA101281 | g1498192 | 8.00E−54 | putative |
| 41 | 269223 | 52663 | 52923 | MCA101283 | g1652924 | 3.00E−10 | pterin-4a- |
| | | | | | | | carbinolamine |
| | | | | | | | dehydratase |
| 41 | 269223 | 53084 | 55264 | MCA101284 | g4176379 | 0 | topoisomerase IV |
| | | | | | | | subunit |
| 41 | 269223 | 59095 | 59403 | MCA101288 | | | |
| 41 | 269223 | 59601 | 62384 | MCA101289 | g1573871 | 0 | DNA polymerase I |
| | | | | | | | (polA) |
| 41 | 269223 | 196489 | 197751 | MCA101331 | g141770 | 0 | citrate synthase |
| | | | | | | | precursor |
| 41 | 269223 | 250144 | 254073 | MCA101372 | g1788909 | 0 | phosphoribosylformyl- |
| | | | | | | | glycine amide |
| | | | | | | | synthetase |
| 41 | 269223 | 248757 | 249935 | MCA101373 | g2632881 | 1.00E−41 | similar to |
| | | | | | | | bicyclomycin |
| | | | | | | | resistance protein |
| 41 | 269223 | 246950 | 248584 | MCA101374 | g3220230 | e−135 | type IV pilus assembly |
| | | | | | | | protein TapB |
| 41 | 269223 | 245649 | 246836 | MCA101375 | g3025702 | 1.00E−56 | pilus assembly protein |
| | | | | | | | PilC |
| 41 | 269223 | 244092 | 244709 | MCA101377 | g1573909 | 1.00E−33 | conserved hypothetical |
| | | | | | | | protein |
| 41 | 269223 | 240255 | 243272 | MCA101379 | g1736781 | e−111 | Acriflavin resistance |
| | | | | | | | protein D. |
| 41 | 269223 | 239100 | 239612 | MCA101381 | g550460 | 4.00E−18 | membrane fusion |
| | | | | | | | protein |
| 41 | 269223 | 128505 | 129656 | MCA101382 | g45691 | 7.00E−61 | dnaN protein (AA 1-367) |
| 41 | 269223 | 131062 | 133455 | MCA101384 | g41646 | 0 | gyrase B (AA 1-804) |
| 41 | 269223 | 133644 | 135200 | MCA101385 | g1573186 | 0 | GMP synthase (guaA) |
| 41 | 269223 | 136888 | 137169 | MCA101388 | g1001663 | 2.00E−16 | rare lipoprotein A |
| 41 | 269223 | 137351 | 137692 | MCA101389 | g1652134 | 2.00E−23 | FKBP-type peptidyl- |
| | | | | | | | prolyl cis-trans |
| | | | | | | | isomerase |
| 41 | 269223 | 137915 | 139009 | MCA101390 | g2983314 | 3.00E−63 | ornithine |
| | | | | | | | decarboxylase |
| 41 | 269223 | 139063 | 140330 | MCA101391 | g1789996 | 4.00E−99 | alanine-alpha- |
| | | | | | | | ketoisovalerate |
| | | | | | | | transaminase C |
| 41 | 269223 | 140389 | 140727 | MCA101392 | g2407234 | 8.00E−26 | similar to H. |
| | | | | | | | influenzae U32836 |
| 41 | 269223 | 140754 | 141998 | MCA101393 | g1787438 | e−138 | D-amino acid |
| | | | | | | | dehydrogenase subunit |
| 41 | 269223 | 142379 | 144201 | MCA101394 | g1790427 | 0 | thiamin biosynthesis, |
| | | | | | | | pyrimidine moiety |
| 41 | 269223 | 144333 | 146159 | MCA101395 | g1574084 | 0 | ABC transporter, ATP- |
| | | | | | | | binding protein |
| 41 | 269223 | 146383 | 147726 | MCA101396 | g2635428 | e−130 | argininosuccinate |
| | | | | | | | lyase |
| 41 | 269223 | 147971 | 148915 | MCA101397 | g41666 | e−100 | porphobilinogen |
| | | | | | | | deaminase (AA 1-313) |
| 41 | 269223 | 149877 | 150605 | MCA101399 | g1573875 | 4.00E−46 | conserved hypothetical |
| | | | | | | | protein |
| 41 | 269223 | 38460 | 38705 | MCA101530 | g42543 | 1.00E−13 | pspE protein |
| 41 | 269223 | 31815 | 32798 | MCA101546 | g1001340 | 4.00E−54 | hypothetical protein |
| 41 | 269223 | 28035 | 30956 | MCA101548 | g4377308 | e−118 | Zinc Metalloprotease |
| | | | | | | | (insulinase family) |
| 41 | 269223 | 26681 | 27871 | MCA101549 | g2367234 | e−107 | orf, hypothetical |
| | | | | | | | protein |
| 41 | 269223 | 25873 | 26463 | MCA101550 | g1573078 | 1.00E−36 | phosphatidylglycerophosphate |
| | | | | | | | synthase (pgsA) |
| 41 | 269223 | 23781 | 24791 | MCA101552 | g1657863 | 0 | NAD repressor/NMN |
| | | | | | | | transporter NadRp |
| 41 | 269223 | 23259 | 23432 | MCA101553 | g2636024 | 5.00E−09 | yvlC |
| 41 | 269223 | 19781 | 22992 | MCA101554 | g1657862 | 0 | glycyl-tRNA synthetase |
| | | | | | | | alpha subunit |
| 41 | 269223 | 18833 | 19485 | MCA101555 | g1787111 | 1.00E−42 | leucyl, phenylalanyl- |
| | | | | | | | tRNA-protein |
| | | | | | | | transferase |
| 41 | 269223 | 17415 | 18665 | MCA101556 | g3284000 | 0 | serine |
| | | | | | | | hydroxymethyltransferase |
| 41 | 269223 | 16824 | 17255 | MCA101557 | g43231 | 1.00E−10 | chorismate-pyruvate |
| | | | | | | | lyase |
| 41 | 269223 | 14797 | 16386 | MCA101558 | g2662054 | e−171 | isocitrate lyase |
| 41 | 269223 | 12474 | 14624 | MCA101559 | g1906369 | 0 | hypothetical protein |
| 41 | 269223 | 8656 | 11007 | MCA101561 | g1651530 | e−160 | Ribonuclease e (EC |
| | | | | | | | 3.1.4.—) (RNase E). |
| 41 | 269223 | 6766 | 7716 | MCA101563 | g1573385 | 5.00E−64 | conserved hypothetical |
| | | | | | | | protein |
| 41 | 269223 | 5116 | 6546 | MCA101564 | g4200042 | e−112 | exopolyphosphatase |
| 41 | 269223 | 91641 | 91808 | MCA101609 | g208931 | 1.00E−16 | ORF16-lacZ fusion |
| | | | | | | | protein |
| 41 | 269223 | 88129 | 88366 | MCA101611 | g1334480 | 4.00E−14 | unique orf |
| 41 | 269223 | 86216 | 86662 | MCA101614 | g1573906 | 3.00E−65 | H. influenzae |
| | | | | | | | predicted coding |
| | | | | | | | region HI0882 |
| 41 | 269223 | 83997 | 85778 | MCA101615 | g1572960 | 0 | GTP-binding membrane |
| | | | | | | | protein (lepA) |
| 41 | 269223 | 80995 | 81894 | MCA101618 | g1572957 | 1.00E−80 | GTP-binding protein |
| | | | | | | | (era) |
| 41 | 269223 | 175707 | 176225 | MCA101619 | g560723 | 5.00E−22 | Mip = 24 kda macrophage |
| | | | | | | | infectivity |
| | | | | | | | potentiator protein |
| 41 | 269223 | 174030 | 174176 | MCA101621 | g1894774 | 5.00E−16 | rubredoxin |
| 41 | 269223 | 172917 | 173972 | MCA101622 | g1789065 | 1.00E−42 | putative |
| | | | | | | | oxidoreductase |
| 41 | 269223 | 171413 | 172576 | MCA101623 | g2150108 | 2.00E−85 | periplasmic substrate |
| | | | | | | | binding protein |
| 41 | 269223 | 170503 | 171255 | MCA101624 | g2150109 | 5.00E−61 | integral membrane |
| | | | | | | | protein |
| 41 | 269223 | 169728 | 170423 | MCA101625 | g48972 | 2.00E−64 | nitrate transporter |
| 41 | 269223 | 169168 | 169497 | MCA101626 | g1574579 | 3.00E−30 | conserved hypothetical |
| | | | | | | | protein |
| 41 | 269223 | 167480 | 168979 | MCA101627 | g3005690 | 7.00E−91 | gamma-glutamylcysteine |
| | | | | | | | synthetase |
| 41 | 269223 | 165388 | 166755 | MCA101629 | g1573076 | e−121 | conserved hypothetical |
| | | | | | | | protein |
| 41 | 269223 | 164248 | 164496 | MCA101631 | g1573769 | 9.00E−08 | conserved hypothetical |
| | | | | | | | protein |
| 41 | 269223 | 153230 | 153748 | MCA101633 | g1573022 | 8.00E−20 | heat shock protein |
| | | | | | | | (grpE) |
| 41 | 269223 | 151115 | 153019 | MCA101634 | g2522264 | 0 | DnaK |
| 41 | 269223 | 198632 | 198931 | MCA101637 | g2239247 | 1.00E−18 | SdhC protein |
| 41 | 269223 | 198958 | 199290 | MCA101638 | g42924 | 5.00E−19 | succinate |
| | | | | | | | dehydrogenase |
| | | | | | | | hydrophobic subunit |
| 41 | 269223 | 199379 | 201199 | MCA101639 | g3273345 | 0 | fumarate reductase |
| | | | | | | | flavoprotein subunit |
| 41 | 269223 | 201300 | 201977 | MCA101640 | g2239250 | 1.00E−96 | succinate |
| | | | | | | | dehydrogenase putative |
| | | | | | | | iron sulphur subunit |
| 41 | 269223 | 202407 | 205205 | MCA101641 | g39232 | 0 | 2-oxoglutarate |
| | | | | | | | dehydrogenase |
| 41 | 269223 | 205326 | 206555 | MCA101642 | g39283 | e−131 | succinyltransferase |
| 41 | 269223 | 206648 | 208090 | MCA101643 | g151345 | e−155 | dihydrolipoamide |
| | | | | | | | dehydrogenase |
| 41 | 269223 | 212826 | 214043 | MCA101645 | | | |
| 41 | 269223 | 214142 | 215374 | MCA101646 | | | |
| 41 | 269223 | 216050 | 218155 | MCA101648 | g148698 | 3.00E−92 | prolyl endopeptidase |
| 41 | 269223 | 218735 | 220828 | MCA101650 | g1573174 | e−147 | oligopeptidase A |
| | | | | | | | (prlC) |
| 41 | 269223 | 221075 | 221800 | MCA101651 | g1787008 | 8.00E−40 | orf, hypothetical |
| | | | | | | | protein |
| 41 | 269223 | 221952 | 222545 | MCA101652 | g882483 | 3.00E−50 | ORF_o197 |
| 41 | 269223 | 222757 | 224055 | MCA101653 | g1773120 | e−105 | trigger factor |
| 41 | 269223 | 224295 | 224885 | MCA101654 | g1773121 | 1.00E−84 | ATP-dependent Clp |
| | | | | | | | proteinase |
| 41 | 269223 | 224934 | 226208 | MCA101655 | g1573717 | e−149 | ATP-dependent Clp |
| | | | | | | | protease, ATP-binding |
| | | | | | | | subunit |
| 41 | 269223 | 123662 | 125293 | MCA101656 | g45709 | e−133 | homologous to E. coli |
| | | | | | | | 60 K |
| 41 | 269223 | 122095 | 123465 | MCA101657 | g45710 | e−113 | homologous to E. coli |
| | | | | | | | 50 K |
| 41 | 269223 | 121548 | 121988 | MCA101658 | g42148 | 1.00E−46 | orf1 |
| 41 | 269223 | 120490 | 121497 | MCA101659 | g581147 | 4.00E−80 | orf2, homologue to |
| | | | | | | | B. subtilis ribG |
| 41 | 269223 | 119545 | 120186 | MCA101660 | g150707 | 3.00E−49 | riboflavin synthetase |
| | | | | | | | alpha subunit |
| 41 | 269223 | 118437 | 119363 | MCA101661 | g3328155 | 4.00E−69 | methionyl-tRNA |
| | | | | | | | formyltransferase |
| 41 | 269223 | 117032 | 118369 | MCA101662 | g1573620 | 7.00E−65 | sun protein (sun) |
| 41 | 269223 | 115305 | 116708 | MCA101663 | g2160269 | e−153 | threonine synthase |
| 41 | 269223 | 114048 | 115172 | MCA101664 | g1574014 | 2.00E−44 | DNA processing chain A |
| | | | | | | | (dprA) |
| 41 | 269223 | 113447 | 114028 | MCA101665 | g2367210 | 1.00E−19 | orf, hypothetical |
| | | | | | | | protein |
| 41 | 269223 | 110508 | 111677 | MCA101668 | g1460081 | 3.00E−85 | hypothetical protein |
| | | | | | | | Rv2559c |
| 41 | 269223 | 109304 | 109822 | MCA101670 | g402362 | 3.00E−15 | hypothetical protein |
| 41 | 269223 | 105340 | 106233 | MCA101673 | g1354827 | 3.00E−67 | arginase |
| 41 | 269223 | 104054 | 105262 | MCA101674 | g790956 | e−145 | ornithine |
| | | | | | | | aminotransferase |
| 41 | 269223 | 103248 | 103808 | MCA101675 | g1628369 | 2.00E−10 | gepB |
| 41 | 269223 | 101499 | 102242 | MCA101677 | g4154851 | 3.00E−72 | putative |
| 41 | 269223 | 100074 | 101222 | MCA101678 | g1573761 | 2.00E−75 | conserved hypothetical |
| | | | | | | | protein |
| 41 | 269223 | 98638 | 99816 | MCA101679 | g1574452 | e−120 | tyrosyl tRNA |
| | | | | | | | synthetase (tyrS) |
| 41 | 269223 | 44008 | 44328 | MCA101794 | | | |
| 41 | 269223 | 257352 | 257930 | MCA101931 | | | |
| 41 | 269223 | 238243 | 238896 | MCA101934 | | | |
| 41 | 269223 | 239645 | 239932 | MCA101937 | | | |
| 41 | 269223 | 243516 | 244079 | MCA101943 | | | |
| 41 | 269223 | 44993 | 45466 | MCA101954 | | | |
| 41 | 269223 | 186833 | 187384 | MCA101958 | g42358 | 5.00E−21 | pepQ product, proline |
| | | | | | | | dipeptidase |
| 41 | 269223 | 187980 | 188180 | MCA101973 | g3322357 | 1.00E−08 | dnaK suppressor, |
| | | | | | | | putative |
| 41 | 269223 | 211262 | 211762 | MCA101976 | g529727 | 7.00E−09 | heme receptor |
| 41 | 269223 | 55427 | 56215 | MCA101978 | g1788125 | 8.00E−47 | putative enzyme |
| 41 | 269223 | 56337 | 57158 | MCA101979 | g4155762 | 3.00E−16 | putative |
| 41 | 269223 | 57227 | 58789 | MCA101980 | g1574592 | 0 | peptide chain release |
| | | | | | | | factor 3 (prfC) |
| 41 | 269223 | 62725 | 65282 | MCA101981 | g1574197 | 0 | DNA topoisomerase I |
| | | | | | | | (topA) |
| 41 | 269223 | 106832 | 107182 | MCA102132 | | | |
| 41 | 269223 | 113110 | 113376 | MCA102133 | g1788096 | 5.00E−11 | orf, hypothetical |
| | | | | | | | protein |
| 41 | 269223 | 24857 | 25618 | MCA102137 | g1651338 | 7.00E−08 | PnuC protein |
| 41 | 269223 | 31241 | 31690 | MCA102138 | | | |
| 41 | 269223 | 135356 | 136573 | MCA102139 | | | |
| 41 | 269223 | 262656 | 262982 | MCA102143 | | | |
| 41 | 269223 | 148933 | 149691 | MCA102146 | g496215 | 5.00E−12 | uropprphyrinogen-III- |
| | | | | | | | synthase |
| 41 | 269223 | 155575 | 156525 | MCA102147 | | | |
| 41 | 269223 | 156368 | 159940 | MCA102148 | | | |
| 41 | 269223 | 160109 | 161479 | MCA102149 | | | |
| 41 | 269223 | 161476 | 162411 | MCA102150 | | | |
| 41 | 269223 | 162428 | 163453 | MCA102151 | | | |
| 41 | 269223 | 163450 | 164040 | MCA102152 | | | |

[0146] TABLE 2

| Locus ID | End | Locus ID | End |
|---|---|---|---|
| MCA1c0001 | 5′ | MCA1c0005 | 5′ |
| MCA1c0001 | 3′ | ND | ND |
| MCA1c0002 | 5′ | ND | ND |
| MCA1c0002 | 3′ | MCA1c0039 | 3′ |
| MCA1c0003 | 5′ | ND | ND |
| MCA1c0003 | 3′ | ND | ND |
| MCA1c0004 | 5′ | ND | ND |
| MCA1c0004 | 3′ | MCA1c0009 | 5′ |
| MCA1c0005 | 5′ | MCA1c0001 | 5′ |
| MCA1c0005 | 3′ | ND | ND |
| MCA1c0006 | 5′ | ND | ND |
| MCA1c0006 | 3′ | MCA1c0033 | 5′ |
| MCA1c0007 | 5′ | ND | ND |
| MCA1c0007 | 3′ | ND | ND |
| MCA1c0008 | 5′ | ND | ND |
| MCA1c0008 | 3′ | MCA1c0012 | 3′ |
| MCA1c0009 | 5′ | MCA1c0004 | 3′ |
| MCA1c0009 | 3′ | MCA1c0030 | 5′ |
| MCA1c0010 | 5′ | ND | ND |
| MCA1c0010 | 3′ | ND | ND |
| MCA1c0011 | 5′ | ND | ND |
| MCA1c0011 | 3′ | ND | ND |
| MCA1c0012 | 5′ | ND | ND |
| MCA1c0012 | 3′ | MCA1c0008 | 3′ |
| MCA1c0013 | 5′ | ND | |
| MCA1c0013 | 3′ | ND | |
| MCA1c0014 | 5′ | ND | |
| MCA1c0014 | 3′ | ND | |
| MCA1c0015 | 5′ | ND | |
| MCA1c0015 | 3′ | MCA1c0026 | 5′ |
| MCA1c0016 | 5′ | MCA1c0019 | 3′ |
| MCA1c0016 | 3′ | ND | |
| MCA1c0017 | 5′ | ND | |
| MCA1c0017 | 3′ | ND | |
| MCA1c0018 | 5′ | MCA1c0038 | 3′ |
| MCA1c0018 | 3′ | MCA1c0021 | 3′ |
| MCA1c0019 | 5′ | ND | |
| MCA1c0019 | 3′ | MCA1c0016 | 5′ |
| MCA1c0020 | 5′ | ND | |
| MCA1c0020 | 3′ | ND | |
| MCA1c0021 | 5′ | ND | ND |
| MCA1c0021 | 3′ | MCA1c0018 | 3′ |
| MCA1c0022 | 5′ | ND | ND |
| MCA1c0022 | 3′ | ND | ND |
| MCA1c0023 | 5′ | ND | ND |
| MCA1c0023 | 3′ | ND | ND |
| MCA1c0024 | 5′ | ND | ND |
| MCA1c0024 | 3′ | ND | ND |
| MCA1c0025 | 5′ | ND | ND |
| MCA1c0025 | 3′ | ND | ND |
| MCA1c0026 | 5′ | MCA1c0015 | 3′ |
| MCA1c0026 | 3′ | ND | ND |
| MCA1c0027 | 5′ | ND | ND |
| MCA1c0027 | 3′ | ND | ND |
| MCA1c0028 | 5′ | MCA1c0029 | 3′ |
| MCA1c0028 | 3′ | ND | ND |
| MCA1c0029 | 5′ | ND | ND |
| MCA1c0029 | 3′ | MCA1c0028 | 5′ |
| MCA1c0030 | 5′ | MCA1c0009 | 3′ |
| MCA1c0030 | 3′ | ND | ND |
| MCA1c0031 | 5′ | ND | ND |
| MCA1c0031 | 3′ | ND | ND |
| MCA1c0032 | 5′ | ND | ND |
| MCA1c0032 | 3′ | ND | ND |
| MCA1c0033 | 5′ | MCA1c0006 | 3′ |
| MCA1c0033 | 3′ | ND | ND |
| MCA1c0034 | 5′ | MCA1c0036 | 3′ |
| MCA1c0034 | 3′ | ND | ND |
| MCA1c0035 | 5′ | ND | ND |
| MCA1c0035 | 3′ | ND | ND |
| MCA1c0036 | 5′ | ND | ND |
| MCA1c0036 | 3′ | MCA1c0034 | 5′ |
| MCA1c0037 | 5′ | ND | ND |
| MCA1c0037 | 3′ | ND | ND |
| MCA1c0038 | 5′ | ND | ND |
| MCA1c0038 | 3′ | MCA1c0018 | 5′ |
| MCA1c0039 | 5′ | ND | ND |
| MCA1c0039 | 3′ | MCA1c0002 | 3′ |
| MCA1c0040 | 5′ | ND | ND |
| MCA1c0040 | 3′ | ND | ND |
| MCA1c0041 | 5′ | ND | ND |
| MCA1c0041 | 3′ | ND | ND |

The application's sequence listing, which the Patent Office published only in electronic form, follows.

SEQUENCE LISTING (41 sequences)

SEQ ID NO: 1 - DNA, 429 bp, Moraxella catarrhalis
  unsure 276, 279, 283-287, 289, 337-338, 341: a or g or c or t, unknown, or other
tcagacgaccgcatgcttaccttcaagttcaataccataatgtgtcaacagatgcatgataccttgtggtgtgcatgagccataagcagattcacccattgacatacgcccaaagcttaggcaggtgacgccatcgacatctttatccaaactgatgcgatcaaagcaagctcgttcatcaatctgagttggcacaggatgctgtaataaaatgccgtgcacatctggattatcatttagctcatcaatcttagggagcagctcatcattgggtgntanaaannnnnanaaatgtagccctctcaatcggaacgggtatgtcatcatgtggcatttnnatngataaaatcaagggttaagcccatcggcttggcgactttggcggtctgtgtttttttattaaataaatacatttgcattggctcatca

SEQ ID NO: 2 - DNA, 1169 bp, Moraxella catarrhalis
gttttaactgttccaagttatttgctgacacaaaagaagaatccattttgggttcttctttttttgtcttgtattggtgggcatgataaagtattttgcttgacttcatatgatgatttgctacaatcaaagaaacacaacaacaactgggagtcaatgatgagtcaaatctatcaaacaaccgccagcgtcagtggtgcaagaactggcactgccactcttttggatgatgataaaagttacaacatggttgcccctggtacaaatcaagcgggcaataacccagagcaattttttgcaatgggatatgctgcatgttttgatggtgctttagcgcttgtcaaaaaatcagctgacaaatcatttgatagcagaaccgaggtaaccattgagcttaacaaagaaggtgattctaacttctttttcactggtgctattcatgttgttgccagtaatggcgatatcaccgaagatgagctgttatcattggttgaaaaaacgcataccgtttgcccctactcaaaagcagttcagggcaatattgacatgaagctgagtgcttcggtagagtaatcgcaatttagccatttaagcatttatttatgccgcccaaatcgttcagttgctttgggcggttttattttctgttattttattttaatttaaaaatattaaatttaattaagtttaaataaaattaccctaagataacctagggtaatatggcaaatgcacttgctaagaattggttaagcttctactactgggattttaccaattttagcttgccaaatctttggtgctgttgcatgtaccgaactgccgctactatccactgccacagtcactggcatatcacaaacctcaaattcataaatcgcctccataccaagctcagggaatgccacaactttggcatttttaattgccttagaaaccaaataggccgagccacccactgccatcaaatagaccgccttattatcagcaatcgcttgacaagctgcctcaccacgctctgatttaccaatcatacccaataaacccgtttgctccagcatttgacgggtgaacttatccatgcgtgttgctgttgttgggcctgcaggaccaaccacctcatcacccacaggatcaacaggaccaacatagtagataattttattggt

SEQ ID NO: 3 - DNA, 1106 bp, Moraxella catarrhalis
ggcacttttcatgcccttcacatcattggcggatttggcagtatcataagctttttttgctttatgagctttttgagctacatcccccaaaccaggtataagacctatggttgcaaaaacataatcgccagcagttttggcctcaacaaatccttggatatcaccgacaacaggaataaagctagtaccgattaagatgtactgcttgttacgactgatggcttcatgcaactcaagaccataagagccgtcagtattatttacgatttcatcccattcattgggatacatctctgcaaaagtattattctccaccgcctccgctgccacaccagcagccacattgacatcttcaccagcaaaggcagcggtgatgcctgcaatcagtttggcagcatttaggatatgggtgtttgtgtattaggctttaaaaggttttcaagcgtactgtttcatcatttcaataacagggatataatctttgtcatgactccaaaacaactctaataattgtaacacttcataatgaccattataaaaatgaacattgccaccttttttgagcatcagttcaagtacatctaatcgctttggtatcatacctatcattgccaagggtatgacattgtctctattaggaatattagggtcagcccctgcctccagcaaggcgatagcagcatcagcattctttgaacgcatggcatagtgtaatggggtcataccataaacatcttgggcattgataggaatgccttggttgatgaggtatttcactgataagccagtcttgtaactatcagaactaggacttagtaaaatttgatgaagccagttccattttgagctttctgaaatatcaaaaatacaatgattttctttgaatttatcaaataaaattaaagcatcttcaatcataccctttttcaagaacgataaaatttcagcaccctgaaattcaatatctttatcataactcattatttaatacctcttttgcgtttaaattcattgatatcattgatgatgtcttgtaaatcaccattgccaggtttctcattgcgatgacccatattatccgatgcgttttcaagtctgaaataatc

SEQ ID NO: 4 - DNA, 2642 bp, Moraxella catarrhalis
cgtgattaaagtgatgaaaaatgttaacttgtatgatgtttttatcaacgatttatcatacaatagatgatttaggataggggaaatgatatgagcttattacaaagcattgttacagaagtcttaaaaaataccgtacagtcgccacctaaagctcagcaagtaccaccaaacccccagcaaggtggcttgggtggtttattaagcggtttaacaggtggtcaatccaatgccaccagtacaggcttaggcggtctattgggtagtgtcattggtacacaaatgggcaagcaaacacaaggctcaccgcttgatgctgtgttgggcagtttattgggcaacaatcaacaaaataccagcgctggcgatttgggtaatgtgcttggtgcggttttgggtcgtggtaatgtcaaatcggtcggcatgaataaaagtacactgttgcttgctttgttgccaattgtattgacatttatccaaaaaaatggcggtctgtcaggcgtacttagcaaattttctaacaacggcttacaaaataaggtgcagtcttgggtgaatgtcgataccaataatgatggcattgatgccgatgacatcgccagattatttgatcatcaagacattgaaaacatttgccaaaaaacaggtgctagccgattggaagtttaccaaggtatcgcagagcttttgccgaaagtgatggatgatttgacacctcaaggcgatctatcaaaagaaaaagaggctaatgatgagattgctgagttattagcaaatctgaaagccgctcagtaatgtgctacattcataaaaaacaggttttaaaacctgtttttttgggcttattggttggattttatcaaaagaagcgtttgatgagatttgtatttttattcaaaatcgccgtatcttacggattaatctagttgtgatgagaaattatggcaaatttagcgttatttgatttggatatgacactgattaatgtggacagcgaccacagttgggggcaatatattgtcaaaaaaggcttggtagacccgaaagcttatgccgatgccaatgataaattttatcaagattatattgcaggtacgcttgatgctgtggcatataatgaatttgtggcggcatttttaagcactcaaagcatgacagatttgcatacttatcgagatgagtatctaaagacatggatacgcccaaatatgcgtccaaaggcgattgaacaaattgcttatcaccgtacccaaggcgatacagtcgtggtgattagtgcgaccaatgattttgtggttgtacccattgctaagttatttgaggtggatgatgagcatactttggcaactcgcctagaggtggtggatgatgtttatacaggtaaagtggcagataagcctaactttaaagatggtaaaatttatcatctaaaaaatcttattaatcgctttgaatcgcaaggcatcaaatttgataagctcatcgcctattctgactcaaaaaatgatattccactgttaaaccatgccgatgaagcaatctgcgtcacgcctgatgataccctaagagcgtatgccaaagaacaagggtggcaagtggtagattgggcaatgtgattgatattgacattaaaacacaaacacgccattaagccataaatcaaaacaccagatgggcttttggcatggtaaaattagataagatttggtataattttttgtttaaaatttcggcaatcctaccgaattgttttcacgggagaaatcatggaaattgcacggtatcaagaacaaatcaaagatttgcacgctcgtgggcaagagcttcgggggtatctttgacattgagagcaaaaaagaacgcctagaagaggttaatttagaactagaaaaccccgacatttggaacaatcctgaccttgccaccaaaatcagcaaggaaaaatcagtgctagatggtatcgtgggcgtgatagatggcttatccgccaaactcgatgatgctgccgccatgttagagcttgctgtagaagatgatgatgagagcctgcttagtgatgtgcaagcggagctggatgatgccctaaacagcgtagaagagttggagtttaggcggatgtttagcggtgagatggatgccaataattgctatttggacatacaatcaggctcaggcggtacagaagcacaggactgggcccagatgctcttgcggatgtatttgcgttggtgtgaatcgcacgactttaaggcggaggtgttggaggtttccgaggggggcgtggcaggcatcaaatcagcaaccattatggttaaaggtgattatgcttttggctggcttcgtactgagattggtgtgcatcgcttggtgcgtaagtcgccttttgacagtaataacggtcgccatacctcgtttgcagcggtgtttgtctcgcctgagattgatgataatattgacattgacatcaaccctgccgatttgcgtattgatacttatcgttcaagcggggcaggcggtcagcatgtcaatacgaccgattcggcagtacgcattacccatcaaccaacaggtgtggttgttgcttgtcaaaatgaacgctctcaacatgccaacaaagatactgccatgaaaatgctcagagc

SEQ ID NO: 5 - DNA, 4258 bp, Moraxella catarrhalis
cttggctaagccgatggcgatgatgctattaaatgccaactgcactttaacgatctgccattcacgcaccaaaaacttagctgagtatctcgcttcagctgatatcgttgctggtgctgttggcgtacctgaattaatcaaaaaatcatggattaagcaaggtgctgttgttgttgatgcaggatttcattcgaccgatcaaggcggctgtggggatatcgaattggacggtatcgaggccatcgcttctgcttatacgccagtaccagacggtgttggtccaatgaccatcaatacgcttatccgtcaaactgttgaagctgccgaaaaagaagcaggtttgtaatattacgatagatttttacttttgaataaaatcccacttgtaaagtcatgcaagtggggtttttattgagcattaatcatatgcaagtgcttattttgaatttatatagacaaattttgatcgcctatcttagtgcgtcatactgcctatttgcacattatatggcaatatttgataaatttacaaaagatttacaaattgtgtcagattttaacttaaaagtatcaaaattttgtggtagcgtttatacgagatgattatagatcgcatcctatttgttggaatggcagatccgtcatcggggtgtgattatagtttatagtctcctctttttttagatgatttatttaaaggataattgatatgaaaaaattatttgcaggcgtggcgttggcttctgtagcattggcaggatgtgcatcaaagcagcttgatgataagcgtttgatgattgttgagggtgaagttaagcaggtgcaagttcaagatttgcgtacttccaagtagagatcgcacctcgtaaagctgtgtgcgagctaaccaataacttgggtgaaaccgtgcaagcagaatgcttacaatatcgccgtacttttgatcgtaattttaatgtgctaagtggtgatattgagggtttccaatacgagccaggtttccgctatgtattagacctaaaacaagagcgtctattaaatgagacaactggtcaagttgttccaaaatggactttgaataaaattatctcaaaaacacctgaaatgctataattatcagcttgtttcaatcaatgtttcaataagtgtttcaataaaaaaccaagctcattgcttggttttttatgattgagattagcattgactaaatcctgagctaatattaatggcatcaatacgctgtgctgtcttcatggcattggtagcgtggatagccagtccacctttggcggtttctttgtatttatccatcatatccatgccagtttctttcattgtggcaatcgctttatctaatgagacatgatgactgccatcacctcgtagtgcaagacgcgcacattaatggctttgaccgatgccatggcgtttcgttcgatacaagggacttgaaccagtcctgcaattggatcgcatgtcaagcccaaattatgttcaagtccaatttctgctgcattcaagcattgagcaacactgccgcctaaaacatgagccaatcctgccgctgccatggcacaagcagagccaacctcaccttgacagccaacttctgcccctgaaattgaggcattttgtttaatgagtgcaccgatcgcacctgcaaccaacaaaaattcacgcaccccttggtagctaaatgctggaataaatccacggtaataatgtaatacagcaggaatgatgcccgccgcaccattggtaggtgctgtaacgacctttccgccagcggcattttcttcattgaccgccaaggcatataaattcacccaatccatggcaagcagacctccattgcctgaatacccatattctttggatagttgttcatacagatctttggcacggcgtttgacatttaagccaccgggcaaaatcccatcaactttacagccttgagtgacgcaagcttgcatggtatcccaaacatcgtttaaatacgctttaacatcatcaatatcccttagggcagtttcattggcaagcatcaaatcggcgatacttaaatcatgtgcttggcataatgctgccagctcttctgcactgtcaaaatcataagggtaggctgattgagtatcttgagatggtgctaagtgaatttgctgctcatctttgataaagccaccgccaacagaataataagtctgtgccaactgctcaccatcatcaagtatggcgatgagtttcatgccattgggatgctcaggtaatggcgtgtcatcccataaaagatgttcgttagcatcaaatgcaatctgatgcgtgccgcccaacatcaaccgaccttcttggtagatgggctttaaatattcttcggttcgagtggtgtcaattgtaggtggctcatgccctgataaaccaagcaaaatagcggtatctgtggcatgacctttgcccgttgatgataacgagccatataactcaatggtaatttgacggacgctatccatacgatcgccaagcaacaccaaaaaacgattggctgccaccatggggccgaccgtatgtgaacttgatggtccgatgccgattttaaacagttcaaaaacgctgatcataaagcattattccaaatataattatctatacaattgattataatggattacagccttatgagcaattgataataaattttgatgatttgccgacttatcaaatgttaccaaaggctaaaatacgataatgaatcatggcgataagtgtgatatttaatctatttttaatcatgatcaattttttaaataattgtttttgaaaaaattaataaaatgaattgcaaatgggaataattattgttattataagcctgtaaagtaaaaaacatgaatcattgttgatcatgaaaacctcttaagtttatcggtatcgaaagcgaaaggagtcatctgatgtatgtatgtatttgccatgatgtaaaagactcacaaatcaagactgcgttatcatcaggcgtatcaggtatgaagggtcttcaagagtctttatctgttggtacttgttgtggttgctgtgtaccgatggttcaggatttgattgatgagcatcaagccaatgtgatcgccattgatgtgatggcaggttaagaaactttgattattaatgtttctaaattatttctaatttttattcgatgtcggctttgggcggtctattgaacaaaataagcaaataaaccgagtggttaatcaatcacaatttataccaattctcattatagattatattttatatttaaaatcaaaaagttatatctatcctaaaaatcatctgcctagttttatgcagatgattttttgttttacttgtaaatgcttatcagattgcaaagcgttcgcggttcaatatccctacaaagctaagatagacgatttgaaattttatgataagatagtggccaatatagttaccaatcgctatttaaaacagtgttatcaatttggtatattactaaggagttttatcatgaaatcatctcaaaaagtcattgattatcttaactttttattaggtggtgagcttggtgctcgtgatcaatacttcattcatgcacaaatgtatgcggagtggagttttggtaaattatatgatcgtatttatcacgaaatgcaagatgagacaggacatgcacagttattaattcagcgtatcttgatgttgggcggaaagccaaatatgaaagtgggcgaaattcagattggctctgatgtgccaagtatgctaaaaagtgatcttgagctagagtatcgtgttcaagaacatttaaaagagggtatcgcattgtgtgagacagagcgagattatgtgacacgagatattttggtgcgtcagcttgaagatactgagcaagatcacgcccattggcttgaaaaacagttgcgtttgattgatttgatgggtctacaaaactacctacaaagtgtgactgctgaagttgatcagcagggcaatgctcactaattgggagtgattatgaaaggtaataaagaagttatccgtgcgttaaatttggtattgggtcagtcactcattgcgatcaatcagtattttttacatgcacgcatcaccaaaaattggggcgtccatgagcttaatgaagtattttataagcaatccattcaagagatgaaatggtctgatgagcttatcgaacgaattttactgttagaaggtttaccaaacctacaagatcttggcaagc

SEQ ID NO: 6 - DNA, 5009 bp, Moraxella catarrhalis
gctatttgggagttttgattgtaggatattgattatttttggataattaataattaaacggttaatttgctcgattttggttttatcaggaggataaataatgaacaataaagtatatgaaaatgccaaatcggcattggcggatatcgtcaaagataaccaaaccatcgcagtgggtgggtttggtttatgtggtattccagagcagctgattgctgcactgtgtgatactggtgttaaaggcttaacttgcattagtaataatgctggtgttgatgattttggcttaggattattactaaaaacccatcagattaaaaaaatgatcgcctcatatgtgggcgaaaataaagaatttgaaaggcaatttttatcaggtgagctggaggttgaactgacgcctcaaggcacattggcagaaaagctgcgtgcaggcggtgctggtattcctgcttttttaccaaaacaggtgtcggtacacaggtcgctactggcaaagaaatcaggcagtttgacggtgaagattacatcatggaacgctcattggtggctgatgtggcattggttaaagcctacaaagctgacaaggcaggcaatttgatatttcgccatacagcacgcaactttaaccccgatgtcgccaccgcaggcaaaataactgtggttgaggttgaagagcttttagagataggggagattgatccaaacagtgtacatttgcctggtatttatgtacatcatatcattgtaaatgctaatccagaaaaacgcatcgagcagcgtaccatctcgtagtgtatcatcataatattattataaggagtatcagttatggcgtggaatcgtgaacagatggcacaaagagccgcccaagagctgcaagatggtttttatgtcaatcttggtattgggctaccaaccttagttgccaattacattccaaagggtgttaatgttatgctacagtctgaaaatggattacttggcattggtgcatttcctaccgaagatgacattgatgccgatttaatcaatgctggtaagcaaacagtgaccgcacaaatggggggcaagtttttagtagctcgcaatcatttgcgatgattcgtggtggcaaggtgaatttggcaattttgggggcgatggaggttagcgaacacggtgatttggccaactggatgattctaggtaagatggttaaaggcatgggtggcgcgatggatttggttacaggcgtgcaatgggtgattgtattgatggagcatgttgccaaagatggttcatttaagataaaatctaaccgtaccttacctttaacaggtcaaaaagtggtacatcgtattattaccgatttggcagttttagacattacaaataacggtttaacattaattgagttggcagatggtgttcattttgaagaattgcaacataaaacaggtgtgcgtatcattgaaaaataattaataattttttaaataaatatgatataaaataatgaaatgatgacacaagattttattcaatgagtgattgattattatgcttgaaaaataaacgataatgatttatattgtcttttttttacattttgacaaactttttaacaaattctgcctgattttgtgatgattggtgataaaagtaggcacaatgtgatggcatttgccatcgttaaaatgattaacacagttagcaaaagcgatgatgataacaggtaataccatgaaccaaatttttcatttgatgacacaaaccaagcatacaaatcacaccaaaaaggtgctaaaactgagcatgctgtccttgtgtttgctacacatcacccaaactgccatggcagaggatacccttaaggatgtgccaaaagcaacggatttttctgtcatcttagatgaggttgttgtaacggcgaccaacggcaccaaaaaatcccaaaaaccctttaccaaagcatcggccaccagcgtgcgagaaaatgtatttaatgccagtgagaatattgatgccattgtgcgcagtgtgccaggggcgtttactcagcaggataaatcctctgggctggtatcattaaatgtacgaggcgatagtggatttgggcgtgccaatagcatggttgatggtgtaacccaaaccttttacagcacctcaaccgatgctgggcgtgggggtggcacctcacagtttggtgcggtgattgaccaaaatttcattgcaggcgttgaattaaacaaaggcagttttaatggcaaaggtggtctaaataccttaacaggttcggccaattttcgtacgctaaatgctgatgatgtgattaaagatgacaaaaattttggcttcattgccaagggtttgaccggtaaaaatgcgacggataaaaattttatgctggcagctggcggacgtggatggcttgataatggcagtatcagtgctttatatgcttatagccacaaagacattagccaaaattataaagttggcggtggcgggacgcacattggcaatgttggtgatgatttgctacttagtaaacaaaaacaagtttttgccaaagagcatgcactcacttacaatgaagccagccgttcctggcaaaaagatttgaccaaattagataaagaaacaggcaagcctttatgggacagaaaatatcaatttggcggtaagtgctatgggctgggctgtattgatacaaaagagaagtttgatgaatatgttgctgacaaacagcagcagtggcaaaagcatggtgcaaaagagtacagcatcacccccattgatatcaccgccctaaaccaaacctcaaaaagccatttggcaaaaattcgttacaacaatgacaccagcgatgttggtctacaactgcgtaaaatggacaccacgataggcagtcgccgtatcagcaatgataattatcaacttgatgctgcttacaacccaaatgagatcattgatttaaaagtgttggcagcccataatgtgggcgtacaaaaataccccaaaggttcaacttttacaggctggaaattggataaagactttgaaaccaaaaacactgccaatctttttgacctgaacaacactcacacctttaatctgccaaagcaaatggatttgaccacaaccgttgggctgaacatattgcataatgaatattcaaaaaatcgcttcccagatgagcttgggctattttataccaatgatttattatgtggcggcggttatgatgcctgtggtggtcgttttcaggggacaagcagcacactgccaaaaaaatcggtgattgtacagccctcaggcaaacagcgttttcattctatttatttggacacatcattacaaaaagacaaatatcagttagattatagcgttaatgccagtcagtaccgttttagtggtgagcatgccagttattatagcagccaaaaagagtttcaagataagtttggtgaagattcgcaaatttataaacagcactgctcgccaagttgtgatgtgtatgagcctttggtaaccacttctggtaaaaaacacgccatcaaccattctgttactttaagtgccaaatatgacacaggttttatgccttttgtcagctttgcacgcacgcacagaatgcccaacattcaagaaatgttcttttctcaaattggtgatgttggcgtcaatactgcattaaaaccagagcaagccaatacatatcagttgggttttaatgtttttaaacgcaatctattgacagacaacgatactttggggctaaaagtagtgggttatcaaagccgtattaacaattacattcataatgtttatggtaaatggtatgacacaaaaaatccacccagttgggtgaccagtggtgcattaaaaggcgataccatacagcatcgcaattggcaaatgcctgtgcataaacagggcttagagcttgaaatcaactatgatgctgggcggtattttaccaatttgtcttatgccagacaaaagaccgaccagccaaccaattatagcgatgccagcgagtccccacgaaatagctcaaaagaagaccaattaacccaaggctatgggctaagcaaagtgtcaatgttgcccaaagattatggtcgttttgaacttggtgtgcgtggctttgatgacaaactcaccataggcagtgcggtgcgttattatggacaaagcccacgagcgaccattgaacccagatacattgatggcacgcatggtggcaatacatcgcattcagatgataaaggtgctcatgtcatcaagcaaattgagatgctaaaaagacagcctttggtgcatgatttttatgttgcttatgagccaataaaagatttggtgatgcgtcttgatgtgcaaaatgcgtttgataaactgtatattgaccccttagatgccaacaatgatgccgccactcagcgttattatcattcatattataatgatgcagacgaaggcgcaccttgtgcagcggggcagttgtgtaagcctgatgcaaaatacggcggtactactcgctcggtattgaccaattttgccaaagggcgttctttattatcttcaatgacttataagtggtagttgtttgattgatgagtgtagcttaaataacttttcttaattgattttgtgtgatattttatgagttaagtttgcatggctgacccccccacttatctctcctttatgtcgatgttccatggcaaagccgtacatcccatgaaatttatcctcaaagactctcctgaaatcatcatgatcagcgactcacttcgcatgctttttgtcaacatctcatctcataatatcaaggccctattatgtcatgttcatgaacaagttttagtgatccgccatcgcgatcttatcgacgtcacgtccagccatgactacatatcgctcattcatgataccatgcaacctatttcaagcattcatcactctttggacgttgatgaataaccttatcataaattacatgatatttttgaccattccta

SEQ ID NO: 7 - DNA, 6703 bp, Moraxella catarrhalis
aaagtatcgttgcagcccgaccgactcaatctcgcttactctgatcgcattagcagataagcgtaaatcttaccgtgtcaatagtagttacggtttaatattacgccttacataatctgtcatagataacttgatatgcttagataactcagttacctgtccaatagccaaaaaaatttaaggaattttgaaatgtgaataaaaacgcaaagtcttatgctctgcgtttttatcttgataaggcttaaatgattaaatcttatttattagccaacaactaaaataaaaaaccctagaataatctagggtttaatctttattgcagatgcagtcgagcagtacaataattagtacttacgctgatgacgcacttgctcacgatagacttttttcttatagcgtttaacggcagccgctttttgacgcttacgctcttgcgtaggtttttcaaagaattcttttttacgaacatcagctagcacgccagctttttcacaagcacgcttgaagcgacggatcgcaatatcaactggttcgttctcttttaccttacttgaaggcataggttactccatatttaagacaggtggcatcaatctggctgtattattcgctatatagctccgttgtcttgggacgggcatcagctcaaatcggaaaaaaaataaacccattcaccctttggtgatatggtctgttttatcaagacagacaaaacagcgaaaattatacatgaatatttataagaaaacaaggattaattgcagtcatgtttaatatggtctaattttttgtcaataaatacttatttttattatcattcacactgtgacaatataggcaacattgattaatttcaacccattttcaccattcaaaccgattgagctaacacgcagtttaaaaagttaaacactacttgatcatcaaataagcaagtagtgtttaataatgacaaagactattttagccccttttccatatcctcaaatttttgaacaatataaacaggcggcggtgctgtcatcagacttactgcaatggttgtcaccaaactaaaagcaaaaccgggtaaaattgaataaatggcatcattagctggctgaccgccaatctcaaaaccaccatacacccaaataatcaccgtcaaggcacccacaatcatgccagccaaagcaccatttcggttcatacgcttccacatcaggcttaaaattaccaatggaccaaatgctgccccaaatcctgcccaagcatgtgataccaaatttaatactgaactgttgctatcgcctgccaacataatcgcaatgatcgcgactaaaacaaccgaaatacggccaataagcacttggcgtgcctctgaggcttgtttatccaaaaataacttataaatatctcgtgtcagtgaacttgagaccaccagcaattggcttgagatggtactcataattgctgctaaaattgccgccaacaaaaatcctgaaatcagcggatgaaacagcacttgtgaaaataccaaaaagatggtttcaggatccttaagctctatacctgtgcgtgccacataagcaatccctgccaagccaaccatcaaagcaccaattaggcttaaaatcatccagcccatgccaatcaccatggcagtcggaacatctttaactgagcgaattgccataaagcgtacaataatgtgtggctgaccaaaatagccaaaaccccatgccatcaaagagataacacccatgacagtcacgccattcatccaattaaagacctcggtatttgtctgtgtggcaatcgccatcgcctcagacacaccaccaatctcgccaaatgctaccacaggtacaattagcatggcgatcagcataatgacgccttggacaaagtcagttaatgacactgccaaaaagccgccaaacaaggtataagccacaacaacgcctgctgttacccacaaacccatgctatatgataaattcaatgagctttcaaacagtttaccaccagccaccaagctggctgctgtataaaccgtaaaaaataagataatgaccaccgccgacatgatacgcaaaagatgtgatttatcatgaaaacgatttgaaaaataatctggtaaagtaacagcattatctgcaagctcggtataaacacgcaaacgcggtgcaacaatcagataattagcacaagcaccaatggtcagacccagtgcgatccaaatacttaccacgcctgaagcgtacatgtatcctggcaagcccagcaaaagccagcctgacatatcagacgcacctgcagataatgcagttacagcaggacttagattgcgtccgccaagcatatatccttcaatgtcatttttttgtttaaaataagcataaattccgattgcaatcatcaaaataaaatagacagccaacgaaatccatacacctgtttctacagattgcatggtcaatctccttttgataaccagcctagcgcatgttatcatttttaataaaatatattggttgaaatattaaaaatacatacacaaagtatatgtatattcacattataacatgaaaataacaaatgattatcatttggcagaataccatcaatatttattcacttaattttaattaaatgaccaaactgcccatttgttttgtttgcaatcggtaatcaaattcaaactttctcataaaatgataatcaaccccctatcgtttgatgactttagggaaatgttataagtaaaccattaaaatcctttaaaaaagatttgttaatttaaaaaacttaggtataatattatgcttattttattttgattatcaaagtatgatcaaaatgataaaacgcccatttgggcatcacttggcgagctggtcgcaagctcgtctgacatttgacatttatctatccaaaaggatctttcatgagccaatttactttaaatggtgttgcgcgtgctgaatcgcagcagggtaaaggtgcgagccgccgcctgcgtaaagacaatcttgttccagcaatcatttacggtggtaatgatgaggctgtggccatctgtgttaaaaccaacgaaatcgttaaagccttgtctaacgaaagctttttttctagcgttatcaccatcaatctagatggtgctgagcatgaagttatcatcaaagcacttcaacgccacccatcaaaaggctttccattacatatcgattttcaacgcatcgttcgtggtcaaaccatgaatttcaatgtgcctgtaaatatcatcaatgaagacagctctgtcggtaaaaaagaaggtggtattcttacaatcttggtgaatgatatcgaagtgaattgcttaccacgcaacctaccagaagccattgaagttgatgtagcaaaccttgccatcggcgattctattcatcttagcgatgtcacactgccaaatgaggtaactttggtgacgcatgatgaagctgacctaaaccgtaccatcgctaccatgcagccacctgctgtcattgaaactgctgatgatgccgaagcttcaaccgaagagacaacagaagcagaagtagcaccagctgacgctgaagagactaccgaagagtaacatacactctgatagtttaaaaaccagtaacttgcttactggttttttcatcacataccaaaaataggtaagcaaaatgggcatcaaattaattgtagggcttggcaatcctggtgtacagtaccaacaaacacggcataatgcaggcttttggttcgttgaacagcttgccgataaatttggtattcggttgatttttgataaaaaatttcatggtcaagtggggcgtggcacgattcacaatcaggaagtacgcctgctattgcccgaaacttttatgaaccgatcagggcagtctgttgcaccttttactaaattttatggcattcatccagaaagtattttaatcgcacatgatgaacttgatattccagttggtagtattaaactaaaaacaggtggtggtcatggtggtcataatggcttaaaagatatcgtgccacatattggtgctgattttcatcgattgcgtattggtatcggtcgacctatgcactcatcacaagtcagcggtcatgtacttagcaaaccttctgctgatgaccgtatcagcattacagctgctattgattgtgccgttgcctcaatccatgaaattatcttaggcgatatggagcgtgcacgcaatcaaattaatggctttagataatacaaacctaccaatcttaccaatccagacttggtatataagcacatcaaatccgcctaatatattcatcggtactccattttaatggcagatacagcaaaaaaggattaaaatccctgaaaaatttgtggatttgcgttataatatgtctattgattcatgttaaatcacccaaaaaggatagttatgaccacgccaaatccttatgcccatcgtaccgcccagcattttgatggtatccgctatgatgaagctttaatccaaaaatacaatcgccaaggtccacgctatacctcctacccaacagccttagaattcatgccaatcgaacaaggcgttgaagctcaaattttagtaaaccgaaatcctgccataccattatctttgtatattcatattccgttttgtcatcatttatgctactactgtggctgcaataaaatcatcaccaaaaaaaacagcgatgcaggcgattatttgacctacttatttgccgaaatccgccataaaaaatctttattgcgtggtaagacttgggtcaaacagttacatcttggtggcggtacacccacttttttaagtgatgatgaactcatcacgctttgggattttttgcatgaagagtttttatttgctgatgagggcgatttttcaatcgaaattgacccacgagaactacgcccaaataccttaaaaattttaaaagatttggggtttaatcgtctaagctttggtgtacaagacttagataaaaaagtacaaattgccgtcaatcgtgtacaatcgcttgagttgattcaaaatgtcatgcaagaagcacaagcactaggctttggctcaaccaatattgatttgatttatggactgccacatcaaacacctgccagcatgaatgctaccattgaacaaatcatcaagctttcgccagaccgtctttcggtattcaattacgcacatttacccgaacgattttttgcccaaaaacgcattttggaagcagacctacccagccccaccgataagctaaccatgtttggcaatatcatcacatcgcttggtaatgcaggctatcaatatattgggattgatcactttgccaagccagatgatgccatggctattgcacaacgacaaggtaagctgcatcgtaactttcaaggttatgcaatcttaggcgagtgcgatttattgggttttggtgtcagtgcaatcagccaaatcggcaagcatattttgcaaaacccaacggcattggtcgactatcaagccactgttcttgccgatacactgcccgccatcaaacacatccaaagtgatgataaagatgcactgcgtcgccatgtcattatgaatcttttatgccatgattacatgagttttgaggatttgcacgcacgatttgacatcgatgccaaagaatatttcgccaatgaaattaaaaacctacaagatatgcaaaccgatggtttggttcaaatagatgaagatggcatcacaattttgcccaaaggtcgaatcttaggacgcagcattgcgatggtgtttgatgaatatttaggcaaaaaacacaccaatcgtttctcaaaagttatctagcttatcgtattcagacaaaattaaagacgatttttgcggcgtttgatggtttgccatagtgtttgatgagcaatttttggtacttttaaggtgatggtatttgacaacatatcatgcaccgcaagcccttgacggttaaaaagacaaaataagaaattaaacaaaaaccccaagactgttgctaccaaaatggcaaactttgagccatgtaaaagtgcccccaataatgcacataacgcaggcaaaaggcaagcactgatgatacgcacaaaactttgacgccatgttaaaagtccaccttgatcattgacggtttttaatcgccatgtttgcatgcccagcgtttgccctgatttacgccaaaaaatgccataaaaccccaccaaagttaagacaaatgatggtgtcataattgcatttttataccaatctggtaaagtttgggcctcttgagaacttgttccaatctccaaaaatagcaccgtacccaaaaccgccaatatcgatccaaccaaaaataacattgccaaaatcagcataccatcataaataatggcaaccaagcgtaccataggtttggcaacggtaggttgtgatggggatgtagagactaaatgagaagcgtttggcatgattgatatatcaaaaagaatttgggctattgtatcatgatttaaatttagatgcataaactgcatgacaaagcaagacaagcaatagcttacaaataaaaaatcaccgaatttatcattcggtgatttttatcatatggcacacccggagagattcgaactcccgaccccttagttcgtagccaagtgctctatccaactgagctacgggtgcaagttcaa

SEQ ID NO: 8 - DNA, 7424 bp, Moraxella catarrhalis
acgaactttatcccggtaaattttgtaaacagtgcatgctcgtctggtctcatcatttcgcaagcctgcgtagtagatagatcttaaaaccatcacatcgtcgtaatccaagtcagtgattgaatgccagatatcacggtgacatggttctcgttttctcatactaaccgccctgtgatcttcccaagcgttgcaaagatttcatcctgacgatcttttgatacaggccaatgctcatcattgggcttgttttcaatcgcaggtggtggtgtgtaaacttggcaagtgataccgtctttgacaaagcgattaacgatcagctcatactcatctttgaacgcattttcagcacgccatttgtcatgttctgacttgatatcctgccaaaggtggtaggtggcatcataggcttgtttttcagcaacagtgatcaccgtgttcttaggatgagcaatccacttcaagatattgcccagagcacctgatttgccacgataactgtctgaaatggcatcgtcatggctaaagcttgctaaacccaaacaccagcgacgaaacaaagctgcatctggacaaaaacccttgcttaccatcgtgttgatacccacaaccaactgctcaggtgtcaaatcttgtgtgacaaaagcaaaaatattcaccacatctgcagttttcatagcaccatagcgtttttcaaacgaaccaacagctaagccttgtatgactgccaccaagtgtgacggactgtgaatttgaatcatcaagttactcatgcgtcaccccaagttttggatttgcgtttttgctgtaaaaattttcaccaaagttattcgccatggctgccaattcatcagtgcgattcgttggttttttgctgtccgatcttgataaccattgacgaaatttctgtcttctcacaaagtcagtattcagcggtttaccaagcgtggcttgattgtcgtagtacgccttgaaatcttgcaaagcgatttgatactgcgatgcattgagtgtgacattcacgcctgccctaagcaattcagattgcatttcctgcatgggtggtggttgccaatccgccaagctgcaaaaattttgctcgcgcgcgttagtgtgtatatatattattggttattggtttatggttattggttggttgaacggtcgttgaacggtcgttaatttcctgttgaacggctgttgaacggtcgttaatgtgatgttcatcatttgcttgctgattgttttcgtcttgttcagttttctttttacgagcgttagccgaagctttgccagcatttgatgcaacttcttgctttttcttgtattctgcaatttcttcatcgcatcgtgcttggtgatagccatcatcttccaaaataaaaaaatcttccagcaccatatccactgctttttgcagttttttggttgttgctcgaaggtagcgataaattttatttttatctgatggtaaaggtaattcgtttgaataataccaagcgagtgcacgatgatacatgcactcttcttcgacactcaaatgaatggttgcattgttaaaatcattaatgttgtgactatagtaatgcatcagttcacctccgccgcatagtaaacgcaataaatatgattggtgctatcacgaagtttcttgtttttgatcagcgttttgccttcacgctgattaaacctgctcactgccgagcctgccgctttaatcccaaattgttttttgatttgagctgatgtcatgtgctcacctgttttttgtagatgcgatagcagcaatctaatcttggcatttggatttttatactggcggcaggcgtgagctttgcacaccattttctttgtctgctctttattaagattgatgactttgccaccttttttgataaattcagcgatttctcgctcttgggcgtcaaaatctgtgcgacgcttactaaaagcattgctcacaaaattaaagtttggtataataaattcgttcatttaactttccttaagttaatccgaaaatggacaccgcccctagttgcttctaggggtttttgctttctttcgtggtcgtaactcttctgaacgcaccacgccgtttgttagactttctgccaagtctgcattatctcgactaatataaaagcgattatttaaccaaccgctcacagacgattgttccacatccaaagcatctgctagcttcatctgtgatccaaaaaattcaatgagacgctgcacagctttattttttgttttagacattgtaccactctcttataaaaatataagaaattataagttaaatgatacaaaaaatcaattaaaaaataagtattctaatttgtaaaaatattagttgtctaatataattatcttagaaatatcctaaaaataggaaaaagctatggaactcaaaaatcgtctgaaacatgcaagaaaagccaaggggcttacccaaaagcaagtaaccgaacaaattaagggcttgtcccaatctgcatactctcagcttgaaagtggtaaaagcaaaagcaccactcgtgctattgagctggcgcatctttttggtgttgatgtacattggttaatttctggcgaaggtgagatgacaaaaaataatgataaactcacccctatcaccgaatgggacgacagcaccccattggatgatgatgaagctgagatccctttttataaagatattgcctttgcttgtgggtatggtgcggtcaatgatgatgtgacacatgaaactcgcaaattacgcatgggtaagcgtacactgagcaatcttggggtaatgtctgaaaatgcctttgcagtcactgcccgtgatgacagtatgacgccctatgtacaagatggcgacaccatctatatcgataaaggacgaaaagagatcaaggatggtcgcatttttgcaattcgctttggggagctgtgcttatgtaagcgtctgtatcgactgcctgatggtggcgtgcgtatcgtcagcgataatgccgctgaatttcctgagcaggtcgccaccaagcaacaagtgattgacggtgagtttgaagtgattgggtgggtgtggagtgtcagccgtcttgagcggtggtgaatgactgataggacttttgtggcgtgaatgacaaattcacagtttatacgattgtaatttagttttaaattaggaaaaatatgcagcaatatgtaatatcgactttcgatgaagaagcgatcaaaagggaaatctctgaaaatcaaaagcagtttgattttgatattagagagtacccaattagaagttttggtacaaaaatttaatccctctaaacaaacagagccagagatatttattcccgactatcaaagagagtttgtttgggatttacagcgacaatctttatttattgaatcgctattgattggcttacctatcccctacatatttgtggcagatattgtcgacgatgagcaagattatgttgatggtagagttgagattgttgatggcactcagcgaatgcaaaccatctatgcttatgttaacaatcatcttagactacaaggcatgcaaagattgcattcattagaaggtagtatttttaacgacttaccattggctcaacagcgtcgttttaaccgcaccactatccgactcattgagttaaaaaatattgatgaagatggtagacgcatgatgtttggaagactgaacacaggtggaagcaagctaaccgatatggaagtgcgtatagggtctggagatagcccatttgttaatttcttaaaaactttagctgaaaacaaagaagtgcaaaaactgatttgtgtagcaaaaaataaggagaatcgcagagagcgcgaagaatatattttaagattttttgcttaccgtgagagatatacaaattttggaacaagaaacgatggtagcaccgataatagcgtttctggatttttgaatgactatattgaaagcatgaacgaagatactaattttcagactgttaagaaaccgcaaatggaaaatcagttttttgagatgctagaatttgttcaagctcactttgcgcatgattttagaaaatccaaaaatgctaaatctatttccagaattcgttttgaagcaatctctgttggttcaagcttggcattagaagaaaaccgaaatcttatccctagtgacactaattgggcatatatagacaaagaatttctaactatgatgcgttcagatgcaagcaattcaaaacctaaaattattaaaagaattgagtttgttaaaaataaacttttaggcagagaaatcaatttggataggcaagatgattaaaattcaaaatagatatctgaaagtagcttacgaagaatttgaaatacgactacatgaagtggagtcatatatagattttgttgaaaagatatcaacgatagatgatccgtgcctgacctcaagcaaacctgatttttctgaagcaccttatgaaatcaatagggagcttacaaaaacattgcgggctagctcttatttgatgttatacaatctgcttgagtccaccatgagtaatgctattgactccatttatgaaacaatcaaatccgagcagtgcgatatcatgaatctatccaaaaaattgcataaaattattttaaaaaatcttcaaaaaggattaacccaagaaaagatcacagagctatcaaacaatcacttagatcacagggagcggctatttgacttagggtataataagaaaaagttattcagtggcaatattgactgcaaaattatttcagagtattgccaaaaatatgatttcgaactctgccccattccccaagaggataaaaaatcagcttgttgggataagaatgccattttaaaaattaagacagaaagaaataatttagcgcacggttctgtatcctttgaaacttgcggtggtcaaatggctgttgagtctctgcgtagtaatctaaacaatgtacgagcggtgctactgggtgtttttaatggacttgatatatatatgaatgagaaaaaatatctaaaaaatccaaatacttaatatacaacagctgtcaaaaagctcattccaaccacttcacccaatctaacaggcacagcattgccaatcattctagagatggctgtcatattgatgcgttctgcaaactgataatcttcaggaaaggtttggaatatggcagcttctctcagtgagatggctctatcctgttcaggatgtccaaagcgaccattaccatagcctgtgcataatgtggtcattgttggtgcaggtttatcccatgacatgcgcccataaacgctaccataagttttgccagagctttttttgtgacactcggcaaccaattcttcaggccaatcacgccaactaccgccctgcttagatgccttaatccgcatcatgtttagctcactcaagccagagcttagatgcaacgaatcttcagagcatctttgccctgctacaatgggcgttaagtgtccaatcgcttcttgtaccgtcactggtgattcatgtgttatgggtatcagccctatcttaccaatgcggcttgcaaggagtacatgacgcttgcgatcttggggaataccgtatttaacacactctaccttttgagcagatacttggtaacctagactttcaagtttagccacaaagtcatgatacacttgatgcttggtgacatcagggacattttccattgtcacaagctcagggtacacctcatctatcagtcgggcaaaatgatagagcaatggatatttcttatccatacttgtatctttgccattgttgtatgtagagaatggttggcatggggcacatcctgccaataggcgcacaacaccgtcactgtaccagctttcaatttcatcagcagtgacattacctacgcttttttggacgaatgtggcatcattattatactcgtagccatagcgacaggcggcatcaatatcataacctgccttaactttgataccagctctaatcagtccagcggttagaccgccaacaccgcagaatagatcaactgcttctatttttgtcatttcattactcaaaataacctattaatggatattataatccatttgactaaaaaactcgagttatttttaccaccccacaggtggtttttgtattaccctgaatttaccaccctaacggcggttttttgcctttacacaaattattataacatgtaaccgccctaatggcggttttttataaaataaaataagcatattaatcaatattttataagcaaatttattatttgcttattttttatttgcaaattaatataagtatgcttataataaacccatcagctaatgaaactgagccaattatttaacaacatagaccccaagccagcatctgaccgcttggtgcaaaaagtgtcagattaaggagttattcagctactgacaatcgctttggttgtcagtgtcagattaacttaggagatacactatgcgatcaaccatccaaacggtgatttttatcgtcatcatgatgtttatgttaaaaggctgtctgtatgcctttgaccacgaatgcaagatccaagaagagcttggacgacagtattatgaagaatctattcacctacaacgggagaacccaaacccatgagcaaacttcgtaaacgctatattaaccgtggtatcgttaattttaccgtggtatacagtatctcacgagatgcaacaaaaataattcatgcaatttttatgtatttggagtgtggcaatccgccacgcgaagtatgttgtaatcgcaaagagattcgtgagtactgcactaagctacttaatctgcaagattttgtgttttttcaagacttttgtccgcaccttttcaaagagtttgaacaggacaagggagcaatcgcatgagcaatcttatccacaacctatccaacgccgactatcatgctcaccctgccgtatcatcaagccagcttaagcacatgctacgcacaccagcacattttaaggcaagccttgagacatcaaaagagccgagcgatgcaatgaaactgggctcattggtacataccctactgcttgagccgcatctggtcgattatgagtacacggtcatgcccaagtttgaccgcagaaccaagcaaggcaaggcagactacgaagcttggcttgagcgtaacgcccataaaagcatcatcacagcagatcagatggatacagcgaccgctatgacagacagcctaaagcagtcgtcagttgccaagctgttaaaggtgaatcgcgggctgatagaagcgtagaaatttccccttgatcaagatactggcattgattgaagtgtgcgtcctgactttttgattacgccctgcgactcatcccctaggggcttgattgtaatacttaa

SEQ ID NO: 9 - DNA, 10709 bp, Moraxella catarrhalis
aaatgcaaaaacgcatggaataacagcaagcacttgaagagttcatatccgacatcggttggggcaaacaaattcgctcttatgtgcttgatgattcacgcattaaggatttgcgaacaggggttgaaacttccaatacaacagcggtattaaatggggatttggataagtttattgaagccagtcttaaagcagggttatgacttaatctgatgtatgaactaaaatatcgtccttatgggcgatatttttataggcaatattttttggttcatagattggtattttaacttaatttcaaagttggtggtgtaaaaaaactggtgattaaaacatgcttaaatcttgaataatcatggcaaatattacccaagctatttattttatttgtggttagtgctaaaatcttgatagcttttgctataaacaattgtacacatctataaggagacagaatgtctattgaccgtattcgccacgcaggtttgcgtgaaaaagtgatgagtgctgacaaagccgctcagttcatccaaaatggtatgatgcttgccatcacaggctttacaggggcaggctacccaaaagccctaccaactgccatcgccaataaagccaaggacgctcatggcaaaggtgaaaaatttagcgttggtatggtaacaggggcatccaccgctcctgaatgtgatggcgtgcttgccgaggcaaaagcgttgcattttcgttcaccatttcagtctgacccaatacttcgtaatggcattaatgcaggcgagattgcctatcaagacatgcacttatcgcatgttgaacaacacatgcgtcaaggcttttatggtaaatttgacattgccatcgttgaggcggctgccattaccgaaaatggtgagctgatttttgcgatgggcatcggtcatggcgtagaggcgattaaaaatgccgataaaatcatcattgagattaatgatgctctaagtgcaggcttagagggcatgcatgacatctatgatgaggtgggtttgccgccacaccgtaagcccattcccatcgttggggcatttgaccgtattggtacagcagggcttgccattgaccctgataaagtgcttgccattgtgctaacgagtgctggcgaccgtaattctaaatttgccgagcctgatgatgtgtctaagcgtattgcagctcaggtgattgattttcttgaccatgaggttaaggcgggtcgcttacctaagagcctgctaccgcttcaatcaggcgtgggtaatgttgccaatgcagtcatggcaggtcttttggatgcaccgtttgatgatttggagggttataccgaagtacttcaagatggcatgcttgatttgattttggccaaaaaaatgaaaaccgcttctgccaccgccttgtcatttagtccagatgcactggcacgctttaacgaaaatattgagtttctaaaagacaaaatcgtccttcgccccatggaggttagcaacaatccagagattatccgccgtttgggggtgattggtatgaattctatgattgaagcggacatttatggtaatatcaactcaactcacatcatgggtactcgcatgatgaatggcattggtggctctggcgactttactcgtaatggcttttttagcatttatgtcagcccatctactgccaaaggtggggcaatctcagcgattgtaccgatggtcagccatcatgaccacaccgaacatgatgtgatgtttatcgtaaccgaacaaggcatggcggatttgcgtggtaagtcgccaaaacagcgtgctaaggtgattattgacaactgttcgcaccctgattatcgtgacatgcttcgtgattattatgaccgtgcatttgtggcaagccaaaaaacaggtggtgtacacacgccgcatctgttgctagaagccttgtcatggcatcaacgctttgttgagacaggcgacatgcgtattaagtaattgatagatcttacaaaaaccgttcaatcaaaaccgattggacggttttttatttggataaatgcgtataccgccataccaaaataaaaaccaaaattgatggtgaagattttgcaagcttgctttgatgactgatgagtcaaaagggaggtttgcattacaaaagggcattggctattttattaggagaattttgtatatcggttttaattgctcatatcatgatgctgttaccaagccatgctttttaagcttatcagctggaattggtcaagtttcatacagtctatttgagcagttttattataaaggaatgaataatgcagtatgttgctcctatccgtgatatccagtttgtgatgcatgagcttttggacagtcaatcacactacagtaaactgtctgcttatgcagagcttgatacagatacaatcaatagctatcttgaggcggcagctgattttgcacagtccgtgattgcccctttgaatcgtacgggcgatatcgaaggctgccaatttaatcatggtgtcgtcacgacaccgactggctttaaggaggcatacgcacaatactgcgagcttggttttcctgcgatcaatgctgagcctgagtttggtggcttgggcttaccagtatcattatcaagtgcggtcagtgagatgatggggactgccaactggtcatttgcgatgtatccggggctatcacatggtgcaattcaaaccattgaacatcatggcacagaggttcaaaaagccacttatcttgaaaagatgaatacaggggcttggtcaggcactatgtgtttgaccgaatcgcatgcaggctctgaccttggtatcatcaagacgcatgctgtacccaatgaagacggcagctatgccattactggtcaaaaaatctttatctcagcaggtgagcatgatttgaccgaaaatatcattcatcttgtgcttgccaagacaccaaacgcaccagctggctcaaagggcatttcgctatttatcgtgccaaaattcatcgtcaatgataatggctcattgggcgagcgtaacggtgtgcaagcaggctcaatgcaatcatggcatttgataatgaattttttgcttaagcttggttgtattaagttatgttaagcataaaattaacccaaatttgagttaatttaatttaacgcattcaatcacaccaaaaaaggacgaaagattatttttgtccttttttggcgatgaatgaatagatagcctaccgcagtatttggtaaatacacataaatatgatacagtagcgattatttttcaccagtatttttatccaaatgattgcaaagacccaattgacggtaatcatgagcaacgattttatcatcatgcttatttgaactaaaatcaaattttgggttaatcaaaagacagccaatcatcactgtccaattggttacaatctgatgttattgatgggcaaaatcatccagcggagtttcattgtgctagaaaatgacatgtcaaatcttgaacaaatattacagcgtatcgttatgctacaagagctgccagaacctgaagccttaaaacgcttgatcgatgctttgcgtgttactgacgaagatgaagataatgaaattgtggatgccaaatttgatgagctgattgcacttttgcgtgagcatcctgagtatggttcaggattggcggcctttattttacggttaattaataaatatcgtcaaattactttatatacagatacaggcattgcatccgatcaaagtttttcaagtagtgtctcacgcttaatcagccaccgttttttgccattactgcccgaagaggattcggtggttgagcttgctaattatctttttgataggaataatgattggaagtgggtagaatccatctcggatgaacgatgggatgctttggtgccgttgattcgtcctgatgaacaggatctaagtttggtggctcaagccaaaaacagcattctaaatgccatcgtggtattgtcatatcgcatcagcggcattggcctacatcctgagctgatgaatttttatcctgagctgctgaattattcggcggcatttgtggcacaaaatcaagaagcggtgttatttgtcaatcaatatcgccaagctcatgaactggatttgatgacagatgtcatccctgatcaagacatcgaccctgcccctttgatggtgatggtggagcaatgtgaagatattgtcgatacactcagaaagcgagtatataaaacaggtatttcaattcgcctgacaaatatgttagcacgccttgagcaaagtttacagcgtatgcggactttggttgagcttgtgagtgatgcagagcataagcgtgatcaagcgattgcggatttgaccattgaagtggtgcagactgctaaaactcgctacagttttagctcattgattgagtcaaacacccgccttttatcacgcaaagtaaccgaaaatgcagggcgtgttggtgaacattatattagtaccgatagaactggctaccgtaaaatgtataaaaaagcagccattggcggcttatttatcggctttatggcgacattaaagatgctgtcttaccatgtggtattagcaccaattggacgcgcttttgttaatagtatgatttatggcttgggctttgtttttatccacattgccaaaggcactgttgcaaccaagcagccagcaatgacagcagcagcaatcgcatcaaccatctctggctcatcaggcaaaaaaactcagcagctggcaaaattagctgaattggttgttgatattttacgcacacagtttatcgccattttgggtaatatttcagtggcgatgccagtggctttattgattgcactggcatgggggtatttttatgatacgccgatgattgatggcgctcaagctgctcatttattgcatgatttagacccaattcgttctttggcattaccacatgcggcaattgctggggtgtttttatttgtctcaggattggttgcaggctattatgataatttggctgcttataataaaattggtgaacgcatacgcaagcattgggttttgatgcgtgtgatgccaaagcggtggctggataagatgagtagttttgtagaagccaaccttggtgcgatcatgggtaactttatttttggctgttttttgggcagtacagcaacggttggctatatgcttgggttacctttggatatccgtcatattgcttttgcttctgccaactttgtgcatgggctatattatctatcgcctgagcatttgacttggcaggtggtaatattgtcttttgtgggcatgttgctgattggtatgatgaaccttttggtcagcttttcgcttgcgttgatggtggcattacgctcaaaagaggtgaaattcacagaatggaaacagctttacaaactggttaccaatcattttatcacacgccccttagattttgtctggccgcgtaaacaaactgtcaaatatgccaagattaatagcttgggtgagattatttttgaggaagcgacggacgaaaaagccaatcacatttttgctgattcaattgtccgccgcttaggacgcaataaacccaaagacgcatcaaagggtgaagtgcccgatgatatccgagaagcgatcgaagcgtatcataatgatgaattggatgagtcaggtaatctggtggataaatcatctgacgactataacgataatggcatcaattctttaccaaaaccctcaacgccgcctaatttaccaggttgattataacgcttttaattttactgtctttacctttgggtatgtgatagtcgtgttaaaaactttgcttttggcaaagtttttgcttgtacaagataatcaaacttacctgctgatttaaggggttgaatcaaataaaaacctgctgatgacaccagcaggtttggtttgcaatttaggttaaccgtttttaaattaatcattttccaaaaatgagcgtaaatgttcagagcgagaagggtggcgtaatttacgcaatgctttggcttcgatttggcggatacgctcacgggtaacatcaaattgcttaccaacttcttcaagcgtatggtcgcttggcatatcaataccaaatcgcatttttagaactttagcttctcgttcggtcaaattatcaagcacctcacgagtcgcttcacgcaagccttctgccgttgcgttttcaattgggcttgagatggtattatcctcaataaaatcacccaagtggctatcttcatcatcaccgattggtgtttccatagagatgggttctttggcaatttttaggactttacgcactttggcttcgtccatatccaaacgctcacccaactcctctggtgttggttcacgccccatttcttggagtagctggcgagatactcggttgattttgttaatcgtttcaatcatatgcacaggaatgcggattgtgcgtgcttggtcagcgatcgagcgggtgatggcttggcgaatccaccaagttgcataggttgagaatttatagccacggcgatattcaaatttgtccaccgctttcataagaccaatattaccttcttgaatcaaatcaaggaattgtaagccacggttggtgtattttttggcgatagaaatcaccaagcgcaagttagcctccaccatatcttttttggcacgacgagccttagcctcaccgatggccatttggcgagcgactgccttcatatcacggatgtccatttgaagtgcctgttcgtgtgctaagagtttttgctgtaaggcaaccacttcaggctcaattttggctaaagtttcggcaaaagcaggaccgcctttgatgcgatgagacagccattcgagattagtttcgttgcttgggaaggtttttttgaactcatccataggcattttaccatggcgaatcacaagtttcatgatgcggcgttcattacttcgcacatcttcataaacttcacgcatcaaactcatgacttgatccgacaagcgattattgagtttaatgagcatgaaatgattggccagctcatcataagcgactttaaccgcttcactaccacgcccatgcttagccaaggcttcttgggctacatcatacaaacgctgaatctcctcaaaacggacacgcacctcttcagggtctaggcttgaatcatcggtatcatcaagttcagtaccatcagactcaccatcttcttcagcatcatctttatcggtggttttgggtgatccaagatccagctcaatttcttcttcgtttaaaataaaatcgccatcatcgccatttaaaaacccagagacaatgtcggaaatctttttttcaccaagaagcacttgctgatattcatcaagcacaaattttactgtgccaggccaatacgccatgatatattgaacctcacgagtgccttcctcgatgcgtttggcaatgccaatttcgccttcacgggtcagcaaatccaccgtacccatctcacgcatatacatacgcacagggtcggtagtgcgtccaggctcagtttcaacagaggctagtactgctgctgcttcatcggttgcgatgtcatcatcgctaccagtgtctgataataaaatatcatcatcatctggtgctacctcaaagacttgaatgcccacatcggtcaacatctgaatgatgtcttcaatttgatcgctttcggtgacagactctggcagttggtcattcacttcagcataggtgagatagccttgctccttgcctaggcgaatcagtgcacctaactgtgatgaagaagtgtcgtgatcttcgttaatatgattatgttcacgcatgtgtattttgtctcttggtgggcatcaaaacatttcattatactggctttttgggtatctttcaacttagtgaaagtctcggtaaggattttattaaaaatataaatttatgaatttataaaaatattctaatgataaaaccttattttttattcgttaacttttctttgaaagcctaaaagcttatgcctatattggggtttgaagctgattttaaaagagtgatataaaaaataatgccaaagcaagtcgataattgtcacagagatgattatcaccgatttaacaaatttaatattattgataaaattagtatcattggtaaaaatagtgaacatatcggtcagttgcttgaccttgaaccaagtcggtgttttaatgtaatatcgcaaaatacccactggcatttgatgcttatattaaaggaataaatatgacgcttaaattaggcaataaaagattttggcttgccatgatcgcaacggccgccatcgtggtgggttttcgtgaattggcattggtggtatgtacttggcttgggataccaacggcggcaaatattgtcggcttggtgagcttatttattgtgttggtgggtgtgcgtatgtcggtagggctgccagcatggctatcaagctcagcaagtaccttactggttgatagcggttttgcttttttaccagtctcagcaggtgcagggattttgctgtttgggcttggcgaggatttgctgtcagtctcggcgaccattataatcagcactctgataccactttgggcatttgccaaattatccgctctgtggcttggcagtagcgacaccaaaaatcacagaggtggattatgatgcttgacactaccacgattttgattgcttttatcattactttgattgcacatattggggccaaatatgtccttcgttatttaaataagtttatcaaaggcgtgcctatgatcatcgttgctatcatattgacgccgattttattattcgtcattgggcttgattatcatacttattacgcacatgccagacctgtttttgatcgcttgcttggttatagtacagcactgttagcggtgccattagcgggcatggattttaaaggtttgccagtcaaaaaactgggcgtggtggtgatattggcaagtatcgttggggcgattttaccgatgtctttgggttatctattgacgctaaatatggataccattttggcatttgccacgcgttctgtgacgacgcctgtggggttgtcggtcgcacaaattattgacgcgcctttagtgatggcaaatttgatcatcatcgtttctggtattttgggtgcaggcgtgtgccgaattttattcaaaaatattcaggatgaacgcgcccaaggcttggcgttggggctggtagcacatgctatcggtacagtagaagcgtggatgatcagtccgacagcggggcgttatgcagcgtttggcctagcaattaatggtttagtgaccgccatgtggctgcctgtggcggtgctttggtggttgtcttaacatgacaatgatttaaaatgggctttttatctatcacaattatttatcataaaaattaataaataaaaagcacttatattacctaacaataagcaaaactcttgaaagtttagaaaaattgttaggtttgcgtgtttctaaagtacagcattttgtatttatcagcgtttcatcatggtatttattaattttatgatataatgtgccaaattttttaccgaaacgatgaataaacaacgatatgcaaacttcaaaaacccatgtaaatgccctaactttagcgacatttggcatgcttagcggtagtgcatttgcccaaaactctatctcggcttatattgcacctcaaggttctgcccatgcgactgtggcatcagcttatacttcatcaagcagccaaaacgctgtagagcctggttttttgactaagctgcaaaccgataccatcaattcacaaaaattcaccaaattaagtaacgagtctcaaacggttggccgtttgtatcattataatgagcctacgaccaatttttctgcaaattttgttgcaaacagttatgcaagctactcaggtgattattctgagcgtagtacatacgaccatctcattcgagaatctgcggcaagacatggcgtagatcccgccttaattaaggcggtcatccataccgaatcaagctttaaccccaatgtgcgttcacgcatgggcgccatgggtcttatgcagctgatgccaggtacggctcgtgatatgggtgtatataatgcatgggatcctgcccaaaacatcgaaggcggtaccaagtatttggcgtatttacaacaccaatttagcaatccaaatcatgtgattgccgcttataatgcaggccctggtaatgtcaaaaaatatggcggtattcctccatttcgtttataccaaaattatgggaataagggaaagggaccgttcaacaacatttatcgattggtgcggcattggatcaagggttgatgcgaatcgtaccatgcttgcgatgaatagcccgccagtagctcaggtaaagacaacaacaacttcctacgctcagccaatcacacaaagggcaccaagcaatcctgtgattaatcgtgacgcatctgcacatatttatttttcaaacaatgaataatcagatctttatctaggctgaattaaaatgacttaaacccaaaaaattgttagctttttgtgtctatatcggcaaaaacttccactcatcaaaggttttgccttttattttgcgtatttgtcattataataagtaagactttaggtagttgtatttttgatttat

SEQ ID NO: 10 - DNA, 19988 bp, Moraxella catarrhalis
tgtaatgacatgttcacaaggcaaaggtttggtaagttcaatccaattaaaaccttgatgtgtggggtgtaagcgtgattggggcgtggttgatgaatgacgaatgtgaaaaatgggcaaatcttgctctcgccaatggctaagtagttcaaaacaaacctgctcacagtttgggttgttgcgatgaccgccccagtaggcttcatcataaaagccttgttgtaagtcaatgagcaataaagcggtatttttagcaatcatttagatcccatatttattgttaatgacaaaaaaaaccaaacaaacacaccactgtttttaataagcatggtttttaataagcagcaccgttgcacttgcccaaatgccctcaccacgccctatccagcccattttttcgttggtggttgccttgatacttacacagtctacactgacacccaacacgcctgcaatgcactcacgcatggcaaggttgtgcggtgatagcttcggtaattcacaaatgaccgtcatgtcagcgttgccaagcgtatagctttttgcttgcaccaacgcataaacatgttttagcaaaactttgctatcagcaccttgataagcatcatctgcatcaggaaaatgctgcccaatatcacccaatgccaacgctcccaaaagggcatctgataaagcatgtagcagtacatcgccatctgaatgagcctttatgccatggctgtggggaatgcgtacaccgccaagcatcacaaaatcaccctgtgtgaatgaatgcacatctatgccttgaccgatttttatcatcataaagcctttttgatttgttgtggacaatgcttgtaaaatgactggcaagccccatataatggcacaagtttaccacaatctgataaaaagagacaaccatgaacgcctaccgtctatctgatattgcccaatcttatggcaaagcccccaaagacatcaaagtcatcgttggcatgtctggtggtgtagacagctcggtatcggctgttttgttacaacaagcaggctttcatgttgaaggcttgtttatgaaaaattgggaagaagatgatggtagtgaatactgcaccgccatgactgatttggctgatgcccaagcggtggcggataaaatcggcatcaaattacacaccgctaactttgccatggaatattgggacaatgtttttgaacattttttggcagaataccaagcaggacgcacgccaaaccctgatattttatgcaacaaagaaattaaatttaaagcctttttggattatgcgtctgggccacaatttggacttggggcggattttatcgctacaggacattacgcacgccgtggttttagccaagatggcaaggcccagttgctgcgtggtttggacaccaataaagaccaaagttattttttacacgctgtggggggcgacaaaatcgccaagacacttttccccatcggtgaacttgaaaaaccacaagtgcgagccattgcccaaaaatatgaccttatcaccgccaacaaaaaggactccacagggatttgctttattggtgaacgcaagtttaaggattttttacaacagtatttacccgctcaaaaaggcgatatctacaccgatgatggcataaaaattggcacacatgatggcttgatgtattacaccatcggacagcgtggcggcattggtattggtggtgtggcaaatcgccccgaagagccgtggtttgtgttacacaaagacctgacaaataaccgtctcatcgtcggacaggggcatgaccacgccatgttacaatctgacgagcttaccgcttataaactggattggggaattgctccgcctgctcagatttttggcaagcaaggttttagatgcaccgccaaaacccgctatcgccagagtgaccaagattgtaccgtctttgcccttgatgagacaggtgatacagtcaaagtggtgtttggtgatgcccagcgtgcggtaacacaaggccaatcggtcgtgttttatgatggcgacatttgcttagggggtggggtgattgatgggacaaatgcaaagatttattgattttattgttattttttgttaaaattataagccatttatcaaaattcatcataccaatgcttcatcaaaacccaccaaaatattcatttaaccatcaaaaaatcatcatcattgctttggcttatgttggcgtcatcacaggcgctggtctatcttctggtcaagagatttttcaatattttgcaagctttggcaaaatgggcatgataggcgttgtgattttagggattttgcacgccatttttgggggtattattttggcattgggttcgttttatcgtgccaatgaacacagccaagtccttgataacattgcaggtccttgggtgaaaaaattacttgattggtcattgattatcagtggttttaccttaggctttgtcatgattgctggtgctggtgctaatttaaatcaagaatttggggcacccacatggcttggggcagccctttgttcgttattggtgattggcattagcatgctaaactttgaaaaagtcaccgctgtaatcggtatctttacacccattgtggtatttatcatcttcgctttgacactctacacctttgttggtaaaagctacgattgggattaccttgaccgcattgcgttatcagaacctcaaatttttcccaatgcatggctgtctttaatcaactattacgctttgtgtattatgacaggtgcatccatggcgtttgtgcttggtggtaaaaccatgtatgtcggtgaagctgcccgtgggggatttttagggggtgcgctcatcggcttaatcagtgcttgcaccgcttttaccatctttgccaacattgatttgattttagatgctgacttacccatgcaattattggtggcaaatgttcatccatggcttggcactttgatgagttttatcatttttgccatgatttttaataccgccatcagtttatattactcgctggccaagcgtttttcaggtgatgacaaccagcgctttaaatggatattgattggcttggttttggtcggctttatcttaagctttgcaggttttaaaaaactggtctcaatcatgttccccatcattggctacattggtatgttgcttcttgtcgtgttgttgttggcatggataaaaaaccataaaaagattaaaaccgagcgtatcaatcgccgccatatttatgctttgatgcaaaaaaaattagacgattcacaaagttttaataaaaccgatgaaaaacagttaaataaattgattgaaaattcggttattaatgaccaagaaatcaagcaagacatgactcagctggttaaagacaacctagataaatcatgataagtcatcaatgctttaccatgatataaagccaaacagcacacattgaacaacattcacaacccaatattaaacaaccccaaaataaacttaggaaatttaagactatgccgttatctgcccttaccgccctatccccacttgatggtcgctatgcttctaaatgcgatgctttgcgtccgtatctgtccgaatttggacttatccacgctcgggttactgttgaaatccgttggttgcaagcccttgccaatcacccacaggtgatagaaattcagccattttctgccaaaaccaaccaacgccttgatgaaattgtgcaaaattttagcgaagaaaacgccctgcgtatcaaagagattgaacgcaccaccaaccacgatgtcaaggcggtggagtactttttaaaagagcaaatcgctgatattgacgagcttaaaaatgcgggcgagtttatccattttgcctgcaccagcgaagacatcaacaacttatcacatgccttaatgttaaaggcaagtcgtgatgtgctggcaagcagcatgcaacaactcattgacgccatcgccacgcttgcccaaacgcacgccaatcaacccatgctctcacgcacacacggtcaaaccgccagccccaccacattgggcaaagaaatggcaaatgttgcctatcgcctacaccgccaattaacccaatttaatcatgtggaattattaggaaaaataaacggtgcggttggtaattataacgcccatttatccgcttatcccaacattgactgggcagaccatgcccaaaaattcgttaccagtcttggtttaacattcaatccatacaccacccaaattgaaccacatgattatatggcggagttatttgatgccctgcgtcgatttaacacgattttaatcgactttaaccgtgatgtgtggggctatatttcgcttggttactttaaacaaaaacttaaagatggcgaggtgggttcatcaaccatgccccacaaggtcaatccgattgactttgaaaactctgaaggcaaccttggtttggcaaatgcggtcttggctcatttgggcgaaaaattgcccatttcacgctggcaacgagatttaaccgactcaaccgtccttcgcaacatgggcgtggctttgcccaaagtttgattgcctttgatgcctgcttaaaaggcattggtaagttggagataaacgccaatcgtcttaatgaagatttgcacaatgcgcaagaagtgcttgccgaacccatccaaaccgtcatgcgtcgctataatatagaaaaaccgtatgaaaaattaaaaaccctaacccgtggacaagccatgacccgtgagatgatgctggattttattcatggtgatgagctaaatgccgtgccagcaagtgagaaaaaacgcttggcggacttgacccccgccacctatattggcaatgctgatattcaagcaaaaaatattaaagattattttaaataattcatgataatctcttatataaaaatcaccgcttagtaaacttgcggtgattttttttggctggcttttgataagattggcaagcgaatattttttaaaattaattaagctttaggtgctttatttgaaccacttgtcagctgagtaagtcttttggtaacaaagagtgctacaggcaaactaatcaccgcaccaataactacagcaccaatgatatgcatacctttatcaaacccagtaacaaaagcaacaatcatcaacacgccaataatcactgtaaacgcaattgaaaaaatcgcactaaataatggtatattcatataaaaccccatagtttttgtggaataccctatttataccctttttttgcacaaatgttaagcgatttttcaaaaatttctataaaatttttgtgatgctgtgttttatgtacaaaaattgcaccaagcttgcataaatcacttacattaatcatcatttatgctaaaattaatcgtttttggcaattgcgacaggcatttttataagcatttttatccaagctagcttagttgtcccatcaatttagcccataaatacaaaatatccgctgcctttagccaaggattttatatgaaaaccatgcaatcaaatgaagtacgccaagcctttattgacttttttgtctcaaaacagcatacccatgttccctcatcaagtctcattccgcacaatgaccccacgctgctgtttaccaatgcaggcatgaatcagtttaaagacacttttttggggttagaaaaacgcgactatgtgcgtgctgtgtcatcacaaaagtgcgtgcgtgctggcggtaagcataatgaccttgataatgtgggctacaccgctcgccatcatactttttttgagatgctgggcaattttagttttggtgattattttaaaaaggacgccattgcctttgcgtgggaatttttaaccgatgaaaaatggcttgccttgccaaaagaccgtctttatgtgactgtttatcacaccgatgatgaagcctttgacatttggcacaaagacatcggtctgccccaagagcgtatcattgccattggcgataataaaggcggggcgtaccaatccgataacttttggatgatgggggatacaggcccttgcggcccttgcacagagattttttatgaccatggtgagcatatttggggtggtctgcccggtacgcctgacgaagatggcgaccgctatattgagatttggaactgtgtctttatgcagtttaaccgccaaaaagatggcacaatgcagccgctgcccaagccgtcggttgatacaggcatggggcttgaacgcatcagtgccatcatgcaaggggtgcatggcaattatgagaccgatatttttaccaagctgatgacaaaggcggtcaacatcattggcttaccaaccgataccgacattcaaaatgagccatctttgaaggtgcttgctgaccacattcgttcggtggcgtttttgattgctgatggggttatcccaagcaatgaaggtcgtggctatgtgttgcgtcgcatcattcgccgtgcggtgcgtcatggcaacaaacttggggcaaccgatgcgttcttttatcagctggttcacccacttgctgacatcatgggcgatgcctacccccaactgcgtcatgaacagcacaaaattgaacaagcgattttaaaagaagaagaacaatttgccaaaacattatcgcaagggctaaaactgctgtcgcaagaattggacagcttacagcaaggcgatgtcttagcgggtgaaacggtgtttaaattatatgacacctatggctttcctgcggatttgaccgctgatatcgtgcgtgaaaaaggcatcaccattgatgaggcgggctttgagctgagcatggcagagcaacgcacaagggcgcgtgaagcaggcaaatttgccatggattatcacgcactcattcaagtagacagtgccaccgaatttttaggctatgaacggcttgataatgacagcaccgtgattcatctttatcaagatggcaaggctgttgatacactggcagaaggtgatgagggcgtgttaatccttgataaaaccccattttatgccgaaagtggcggacaggtgggtgagcttggcgaaatcagcaccgaatctggcgtatttgatgtgttagacacccaaaaatcaggacaagccatcattcatcatggggtggtgaaaatggggcatattaacaacaatcagtcagcgaccgcccaagtggcaagtcaggtgcgtgcgtccagtgccaaaaaccactctgccactcatttgctacacgccgctttacgcaccatattgggcgatggggttagccaaaaaggctcaatggtgagcagcgatttgcttcgttttgatttttcatatgacaaaccattgaccgaacaaaacatcagccaaattgaaatcatggtaaaccaacaaatattggccaacacccctgcccatgttgagattttggacattgacagtgccaaaaacaaaggggcgatgatgctctttggcgaaaaatacggcgatacggtgcgtgtgctgtccatgggtacaaccgataaagatggcaaaccattttccattgaactgtgtggcggtctgcatgtgactcgtacaggagatattgggctgtttaaaatcataagcgaacaaggcatttcagcaggtgttcgccgtatagaagccgtcacaggcatgggagcggttaattatgtgcaacaaggcgataagcaattaaaccaacttgccaatcagtttaaagccaaacgccatgaaatcgcccagcgtgtggcacaattgagcgacaaaaaccgtcatctggaaaaacaaattgaacggctaaaccaaaaacttgccagcctgcacgccaattcattgacggacaacctaaaagacattcatggtcaaaaagtactgattgccacggtcaacggcatggataataaagcattacgcaccttatcagatgacatgaaatcaaaactggctgatggcattgtgatactggcaagcgtctatacggcagatggtgaagacaaaatcgccatgaccgcaagcgtgggcaaacacttaacaagcaaaatcaaggcaggcgacatcatcaagtacctaagcgaaaacttaggcggcaaaggtggcggcaaaccagactttgcccaagggggtgcaaccgacgtggcgaacctgccaaagctgatgactggcttgacagattggattggggagaaattgggttaaactttacccatattgtcttttaatcagcaaatgccataatggagattaccaaccaaaatgtgtgcatgtttgccgagcattgcaatatatgcacacattttttaattatttgtgcataaaatggagaagtcatgccagcaaccttaggccagttatcaagtgatattgaaaccattgataccttaaaattaactgtagaagctcataaggcacttgcagagttaaaaggtttggcaatgaagtacataaccatgttcaagccatacaccttggatttaatgaaatacacaaaactggacttttgaccaataatacgattatcgccacccaacaaactttagaagaaaatcgtgcagattttcgtactcagcttggcacacaattaagaaatgagcgtataggacaagttatgcgtaaaatattggcttataacttctgctttgtgagtaataaacagttaggcaatcccccatttcagtttgagttacttatttcaagtttccagttgagagcggggtgtaaaaaataatttacaaatcgcctatttgatgaaataatgctttttttggataaattcaatttaaataaggacatacacagtatgacgcaaaatatcaaccatttggaaggcgatacgccaataaagccccataaagacagtggttttatgggacacccaaaacccttgcaaccactattttttactgagatgtgggagcgtttttcttattatagcattcgtcctttgttagtgctgtttatggtggcaaccattcaaagtggcgggtttggctttgatgatgttactgcttctgccatttatggtatttttgctggggcaatgtatttaatggcagtgccaggtggttggcttgcggataactggcttgggcaagaacgggcattgtggtggggcagtttaatcattgccttgggtcatttgtgcattgcgttatctgccatggtgggtgcgtcggtgttttttttggggttgatgttcattgtcatcggttcagggttgtttaaaacctgtatttcggtgatggtgggggcattatatcctgacggtgatggccgtcgtgatgctgggtttacgctattttatatgggtattaacattggggcgttgtttgcgtctttaattgtggggatttttaaagaacaaggcatgtggcatgtcggctttggggtcggtggttttggcatgttggtggctttattgttgtaccgcttttatgcacatgccagcctaaaaaaatacgctcaagaaaataacatcacccctgtgtgggagtaccccagtggtcaggttgccaatgtggggcggtgggtttttgcggtggtggcggtgcttaccgtggtggttgggttaattatgatgggcatcatgccatttaatccacaagtggttgctgaatacatgacttatctgattgcaggaacgattgttttgtattttttgtatcgctttattagcccaagtttaagcaaaaatgaaaaagttcgtttgttgatttgttttttactcatcattggttcgaccttattttggtcaagctttgagcagcagcccacttcttttaacttatttgccgatcgttataccgatttgaatgtgatgggctttaacattccaagcctctggtttcaatctttaaatccattttttatcttattgcttgcccccattgtcagtgtgatttgggtcaaattggcaaataaagggcttgaaccaagcagtatggcaaaatttgctttgggcatgttattggcagcagcagggtttggcttgatgattgtggcggccaaccatgtggtgaaccaacccggtacattggtatcacccatgtggctggtgggcagtttgctcctattgacactgggtgaattggcacttagccctgttggcttatcatcaatgacaaagcttgctcctgagcgaatgcagggacaaatcatgggcttgttttttgcgtcgattgcggtgggtaatctggtggcggcgttttttggtggctatgtcaccgctgataccattaatgacttacccaacttatttgccaccatggcgatatttttggtggtgagtgcggtgatgctgttaattttgtctcatcccatcgaaaaaatgctcaagaactcagaaacacttaagcaggcggaataaatggcaggcaaaataaatcacagatgagataagtcgcagatacaatgagccttagggttagaataggataaaaaaatatgaccctagggcttgtttttaaatatttaatattaaacattaaataacgaccattttaatgacagctcatttatggtctactttgtttgattgacttgatatggcttacttgacttgatgtaagttactttaataactttaaatacaagttaccccacccttaacacctttaagaggggattaaaacaaagaaggcatgaacctaaactttaatcaaagaccaaaaagattagaggataagccatgcccattgacgaatttatcatcaatcgtcttaaaaatgctcgtggcgatattgaaacggtgattgatcggttgtttgggcggtttaatatgcaaaagcttagagccagagatttatggcatttgtctcacagatttatgcgtaaaatattggcttataacttctgctttgtgattaatacacagttaggcaatccccatttcagtttgagttgcttatttcaagttgagagtggggttatagaaggaaattctttatttaaggaaaggtttaaaattttataacagccaaagcgataaattggcagaatctggggcggagtttgaagataaattattaaaggggtgaaaaattattaatgattaaaagaacgaaggataatcacacttatcatctgatggggctaaaatcagcacccgaccaactttgatattagccttgggcgtcagtattggcatacagatgataaaatgcttgtcatataccgcccaatccgctaaaatatttaggttttatcaaaaagctgttacagccagtcttaatcaccaaattcactacaactgattataaattaaaatcagtgatgatcgttatttgatttataaggtatcattcatggcattaatcgtacaaaaatatggcgggacttcgatgggaaacatcactcgcatcaaaaatgtcgcccagcgtgtcaagcgttggtatgataatgggcatcaggttgtggtggtggtatctgccatgagtggtgaaaccaaccgcttaatcggtttggctcgtgagatcagctctgacccggaccctcgtgaatatgatcagatggtctgtacaggtgaacaagtttccatctctttgcttgccatggcattgcaatcacttggtgttgatgccaaatcgatgacaggtgatcaggtcgctattcatactgatgatactcatactaaagcacgcattcaaagtattgataccgattctattctaagcgagcttaatgcaggtcgtgtcattgtagttgctggctttcaagggattgatgaacatggtgatgtgaccactttagggcgtggtgggtcagatacaactggcgttgctttagcagcagcccttaaggcagatgaatgccaaatctatacagatgtggacggtgtgtacaccactgacccacgagtaacacccaaagccaaaaaactctccaaaatcacttttgaagaaatgttagaaatggcatctcttggttcaaaagtgctacaaatccgctcggtagaatttgctggtaaatatcaagtgccacttcgtgtcttatccagttttgacgagggtgatgatggaatatttgatgataaatttaaacaaactgtcggtacgctaattaccgctgatgaaggagatgatatggaacgcgctgtaatctcaggcattgcctttaaccgtgatgaagccaaaattgttgtacttggcgtgcctgatcatccaggcattgcatctgccattttaagcccaattggtagagccaacattgaggttgacatgattatccaaaacatgtccgaaaatggcgtaaccgattttagttttaccgtgccacgcggtgattttaataaagccatgaaaatcctaaatgagcaagtcaaagatgacattggagcaagcgatgttgttggcacaagcgatgttgtcaaagtctctatcgtgggcgtgggcatgcgttcacatgctggcgtggcaagtaaaatgtttgaaacactggcatcccaaaacattaacctacaaatgatttcaacctctgaaatcaaagtctctgtactcatcaaagaagagtgtctggaaaaggcagttaaatcactacataccgcctttggtcttgaccgtgaagatggtgagagcaaagtagcgggctaatcacacacccacaccctgatttcaacagttatgacacaaaaaaataacgaaatcttttgaaaagttactgacaatctgcttaatgccccttataatattgcgttaagcagatttttttggggttaatccgccccacaaccacaccaatttgcgataatgatggattaaaatgggaaaataacagcaatttggtggtatcaaaggagtataataatgctaattttaacccgccgtgttggcgaaaccttaatgattggtgatgaggtcagtgtaactgtacttggcgtcaaaggcaatcaagtccgcttaggtgtcaatgccccaaaagacatcgctgtgcatcgtgaggagatttatcagcgtatccaacacgaacgctctatgcaaatgcacatgagtcatttagaacaaggtggtaattttgccccaccctcatttgatgatgacgattattttaaccgctaagccatagagacatcatgaaaacaacagacatttcacgcattttagcaggtgtagaatcaaatcagctgacctttcatgatgtgcttgcttttattgatgcacattataattatcagccgattgaattttcaaatggcgaggtggctaatgcactaggtaccaacgaaggcagtgctaaggtatttagcctagcaaaacagcatgggcttaataaagtcgataccctaaaattatttgcagaacactatcgtgctgtacaaaatacccctcaaggtattgatcatgccaatatccgtaattttatgcgttatggctgggcaggaatcggtatgccaatcaatgcattaacgccaaaaaactagcctaagcccaatcaatcgccctattgctgaaactttcgaaaataccttgtcaagatatataagttcgtgtataatttgggctttaatttttctgctacttcttgattgtcgtcgcctttaacggtaagacataagtggctcaaccattgaaaagtcctgctttatttgtgctgtgtccataccacaaataaccaagcaccaagcatgaccggcacacctgataccgctcaatatccgtgccactaaattaggagtcaccatgtctcgagtatgtcaagtgactggaaaacgcccacttgtgggtaataatgtatctcacgcacacaacaaaacccgtcgccgttttctgccaaatctacacaaccatcgtttttgggtagaatctgaaaaccgttttgtgcgtcttcgtgtatcttcaaaaggtatgcgtatcattgacaagcatggcattgaaaaagtgcttgccgatttgcgtgcccaaggtcaaaaaatctaacgatttttaccaattaccgaatggataaaggatacaatcatgagagataaaattaaactcgtttctaccgctggtactggttatttttataccaccactaaaaataagcgtaccatgcctggcaaaatggaaatcaaaaaatttgatccaaaaattcgccaacatgtactttttaaagaagcaaaaatcaaataattgatttgtgccaaaatcccagctgaaacttagttgggatttttattataccactattatataaattgatgttatcaattaatgaaaaaatatcgtttggttttttgtatattctttgggctgtgctttagtataccagcttgggcaaattcttttaaattaatccaaagctatcctgtgcatcaccctatttttattcaaggtttacagcttgatggctcaaatcgattggtctattcagctggcttatatggtcggtcggaaatcggttatcttaatctggcaacaggcaaaacatatggcgttaaaaaacttgctccgtctgtttttgctgaagacttgaccgttaccgatgatggcatttggcaaattacttggcgtgaacagatggcttttttaagagatgccaaaacattgaccatcaaaaagaccgcacattatttgggtgaaggctggggtttggcttatgacaaacggcaaaaagttttatggctttctgatggctcatccaagcttcaaaaattagatgccaaaaattttaacaagatttctgagattagcgttcaaaataatggtaaacctgttgaatatattaatgaattagaatacgccaatgggtttttatacgccaatatttggcagagcaataaaattattaaaatcgatcccaatacaggcaaggtactaaacacctatgattttagccccttggtttctacgcttaatcttaccgatcctgacagcgttttaaatggtattgctcatatcggcggacaatcgttttatattactggcaaaaactttggcgttgtttggcaagttttattcacccaatgactgattttatccttaaaaataaacccaaataccagcagaatagccatgacacattgaaaatctgatgactatttgctataatagctccactggggtactcgccagcaaagcgtattcctgagccgatacttttatcttaggatttgggcgacaatgctttgttgtgcatgcctgcatctttttgatgtatcaggaagccgtaataagcatggctcttatccgccttgaacttcacggttcatggtttccctttgtagcggtaccttggtttttttctttaagccagtgtttggatatttttacaaaattttctaaaaaaatttcaaaaaaatgttgacagcttaatttattctgctataatagcacccatcttaagcgaactgcataagataaccgacattccccaatagctcagtcggtagagcatcggactgttaatccgtgtgtccctggttcgagcccaggttggggagccatattttaaaaagtcctttagaattttactaaaggacttttttattatattctaaaatacaaccctgctaaaacataacacttctaaaataaaatacgcatttaaaacaatcttgtgaatggatttaaatgtgtttggtgatatttatttcattgatatttagagtatcttattctaaaaacatcggcatataagttcataagattggccgatgttcagcgacaatcattcatcatccatccaaaattttaggggtaaaggtatcatgccattcatacgccctaccctgatggtatcaatatcaattaccttttttatcatcatatcaagcgtataagggacgagtcgatgctcaagtgtttgtacacgctttgccaagcttttgggtgtatccaaaacatcaacagcaagccaagcctgagtgagtacttgccccgcatcaagcttcggtgttaccacatgaatgctacaaccatgatatttatcacctgactgcagtacccgttgatgagtatccaaccctttataatgtggcaataaagacggatgtaaattaatcatcgcacaaggcatgttattgataaattgggcagacaatactcgcataaagcctgccagcaccaccaaatcaggtgaccaatcttgaatttgctgaagtgcatatttctcaaaagtattgatactcatgcgtttaccatttggcacatgagacaataccgacacctgaatgcctgcatcttttgctcgtgtgattgcataagcatcttcacgattactaatgacgccaacaatatcaatcgcaaggctacctgatttcatggcatcaatcatgacttgtaaatttgagccactacctgataccaaaacagcgaccttaaggggtttttggctcatcaggcatacaccaccgcatcatcagtacgctcaataatctgaccaatctgccaaacttgttcgccttcggcagtcagtttattcatcgcctgcttggcttgatcggcaggaacaaccaaaataaagccaacgccacagttaaaggtgcgatacatctctaaagtgtcaatattgccgccatgttgtagccattggaaaacctcaggcaatgcccaactgctggtgtctatctgtgccgccaaatttttaggtaggacacggggcagattttcggttaagccgccgcctgtgatatgtgccatggcgtgaatattggcattacccaaggatttttgtaaggcattgactgacttgacataaatacgagtgggtgccatcagtgcatctgccaacttagtgccactttctagggtttgtgtatgaacatcagtattggttacttcaatcactttacgcaccagtgaatagccatttgaatgcacgccgctagatgccaaagcaagtaatacatcacctttttggacattttcgccagtaatcacttctgactcttcgaccacaccgacacaaaatcccgccaaatcataatcttcatcttgatacataccgggcatttcggccgtctcaccgccaattaatgcacaatttgccaactgacaaccctcgccaatacctgcgataacggttgcagcggtatcaacatcaagcttacctgtggcataataatccaagaaaaatagcggttctgcaccacagaccaataaatcattcacacacattgccactaagtcttggcctatagtttcatggcgattaagctgtagtgcaagcttaagctttgtaccgacaccgtcggtgcctgatacaagtaatggtgatttataacccgtcggaatgcggcataacgcaccaaatccgcctaagccacccattacttcaggtcggctggtggctttggcaaccgatttaatacgcgaaaccaatgcctcgcctgcatcaatatctacgcctgcatctttatagctaagtggggtttgatctgtcatatttgacccttgttaaaaatgagatgttacttaaattttaataattatatcaaattttaacccaaaatatcagatttgccttgaatttatttggtggcatgtctatttattaagagatattttatatttaaaatgaagatttaaaattaagctgtttggttctgatgattgaacatggtcaagttttatcaaatgcaatgattgattaaaatatacataaaattacatgaaaatttaaatcaaatcacctacaatatcacgcacaatcctaccttttatattttgagttttcatgtatccagccaaaattgatccgttttttcgccgtctgtttattttagcggcgttgtgtttgtttttatatgccctatttttgatgaaaacggtcattacaccctttgttgcagcatttattttggcatattttttaaatcctttggtcagccgacttgccttaattatgccaagaattttggcagtctcagttgtgtatattagctgttttgtggtcatgggcgcattaatcatttggttggtgcctatggtttgggcacaaatgcagatactttgggagtcattgccacatattattacttggtataatgacactggcagagcttggattgctcgctataccaacagtgagcttttgccacttgatattgacctaatatccaatacggccttggattactttcaaaataactatcaagttaacgatgttcaaggtttaattaagcaagtatttagctcaggtatttcagcggccaataacattggtttgattgtcatggtgcctattcttaccttttattttttattgggctgggatcaacgactgtatacatggaagctatctattcctaagccctataccaataaggtcgttagaattgctcgtgactgcgatactgctttgatgaattttgccaaaggtcaatttttagtcatgttgctacttggtgcgatttatgccattcagctacagctcatcggtttgcaattaggattgattattggtatcaccgctggtattgcaagctttgtcccttatttgggttttggtattggtattattgcagcactgatcgcaggattatttcaatttggattagactggatctatttgggactgatttttggggcatttatgattgggcaagtcgttgaaggctatattcttcaacctctattactaggtgataaaattggcctatcgcctttatgggtcattttttctgtcttggcaggtgcatctttatttggttttgtcggtatgctcatcgccctgcccgtctctgcagtcatcaatgttttatttcattatgcgtatgatgcctatttacgcagtgattggcatgaaggtcaaaggcagctgcctttatggaaagaagatgactaaaaatcaccttggtataaatcacttgcataaaatgtacaaaatatggtatatatagccaccaaaaaacacaagaagtgtcatttgtactcattatttatcggcttttgaaccataacgataaaaatccaacatgcactatgaacacccatcaaggctgtcatcatgacccaagcaatacaagattcattgaatttagatattcgtcccgaagcatcacttgaggattttcaatcttcaagttaccgccccattttggatgctattgataaattggtacaaggcagtttgcgtgagctgttcattgtcggtgattctggctttggcaagacgcatttggcaagtgccatctatgagcattatacttcaatgacctcaaaaatggtcatcagcttaaatctaaccgaactcatagaacaagatccgcatgcaactgcacttgttgggcttgagatgtttgatttgattatcgtggatgatttacaaatggttcggcatagctatgaatggcaagaagggttatttcatctaatcaaccgccttcgtgaacaccaaaaacagattttatatttggcagatgatccagcacgagagctacaaattggattattggatttacatactcggctatcgctagcccccatgctgactttgccagataatgatgatattaatgatcgtcgtatcctgattgaggtgattttaaagaaaaaaaactggaagctgcctgaagagatttttgactatttacttgaagagggtcctagaaatgctggggatattaataccgtccttgatcacattcgacctttactgacacgcctttcacgcgtgcaaattcccaaaaaaaccatcgcagaagccaagcaaattattttacatgaaacattcatgcttgaaatcggtgataatgctgactccaatttttgataatcggcttatttaaataaacttaagataaatactagtaatgttacctaattaatggtatgttatgccacatacatagcccacaaaaaggatattttatgaaaaaagtcagccttggcttgcttgtcagtgccctactaaacactggtgccaatgcccaaatacatcttgatgctttgcgattacattaaggtaaccgcaattaatggtcacgcaatccatcatggattattacaaccactacagcatactatacatttagagacaggttcggatgtcgtcccggaccattatgaacagatg

SEQ ID NO: 11 - DNA, 14335 bp, Moraxella catarrhalis
tcccctaaagagccgttgtagacgacgacgttgataggttgggtgtggaagtgtagtgatacatgtagctacccaatactaattgctcgtttggcttgaccatacaacacccaagtggtttaccactgactgtgttgattggtaatatgtaagatgaaccttaatcttgatttggtaataaacagactcatacagcgttgttaatccttttacgctgacgacaatagcaagatggaaccacctgatcccttcccgaactcagaagtgaaacgtcttagcgccgatggtagtgtggttcgcccatgtgagagtaggtcatcgtcagcaccttattttaaacccctctttgcagaagcaaaggggggttttgtttgggggttgaatcagtcttaaaagacagcaaaaaatactacattggatttttatggtattggccttggtgtacaatccaatgactaaagtttattttcaaaagaaattcagacagttataaacttatggacagtagctgttttagtgtttattaattaaagaaagtttttggaattggagtgagatgattaaatatctatttttataaagagcttaatcgtggcaaaatcttgctggatagaaaaaatcctgctaaattatgatggataaatttaatgaaaataaataaaatcctactaacagcaggattttattaaagtgtctattgagatttaggattgatgttcttcgtgtaatctggtatttagttcatctaataccattgcccatacagcatcatttttccactcttcttggataaatgctctttgtgagtcattccaaaatggggcattttttagattagtttcttcatcaagttgattttctgcaatgaacttttcaacggcttcatcgctacttgcaagacctaattgagcaaacagctcgttcatggtatattctatatcacctaacatgactatctccttttattgtgattaaatttattttagcaatttgccaatacttgagcaatgcaagtctgtatagtttgtgttttttaagtgttgtttttaacataaaaaatatccagccaaaaccagctggatatttgaatgtattttctagaattaagaaaataaatgatcaatagcggcacgctcttcttcaagttcgtttagtgtgatattgatacgctcttggctgaagtcatcaatttgcaaatcttggacgatttgatattcaccattttcggtagtcacagggaagccgaacatgatacctttaggaatgccatacgagccatcagatggaatacccatagttacccattcaccatttgagcctaatgcccaatcacgcatatgatcgatggctgcattggcagcagaagcagctgatgataagccacgcgcttcgataatcgctgcaccacgcttaccaacggttggcaggaatgtattagcattccagtcttgatcattgatcatctctttgactgattcgccattaatggtagcaaagcgataatcagcgtacatggttggactgtggttgccccaaacgattaattttttgatgtctttgacagctttgcctgtttttttggcaacttgcgttaacgcacggttatggtcaagacgcagcatggcggtgaaatttttggctggtaaatcgggtgctgatttcatggcgatataagcattggtatttgctgggttaccaacgactaatactttaacatcacgacttgcaacttcattaagcgtcttaccttgaacagtaaagatttttgcattttcttgaagcaggtcagcacgctccatgccaggaccgcgtgggcgagcaccaaccaatagtgcataatcagcatctttaaatgctactttaggatcatcggtaccaatgacatcaactaataatggaaaagcacagtcatcaagttccatgataacgccttgtagtgcttgttgtgctttttcaacaggaatttcaagtaattgtaaaatgacaggctgatccttacccagcatttcacctgatgcgatacggaatagtaagctgtagccaatttgaccagcagcaccagtgacagcaactcgtacaggttgtttcatgaataaaaatccttgtttaaattattaagaaattttaaaaaatagattgattatacatttttaataataatattatcgataaaaatgtcaaatcattattagtgtatcattttatggatttaaagacaaacctttttggtgtgtataagatggcaagttttggatatgagttcgtaaaaactggcatttaatcagtcaaatagactcccaagtccagtcgccacactggtctttttagattttagaataattagtaagggctaactgtacccatacgctgagaaattggggtatattgacctaaaagtaggctataaattgtcgcattttccataacatgcttgacataagctcgggtttcagcgtatgcgatggcttctacatactgatcggcactgatggcaccatgtgttggtacccagcgacgagcagcattaggacctgcgttatagcttgcggttgcgaccgcaatttgtcctctggcacggtttgccaaatcatttaaaaaccaagttccatagcgtatattagtatcaggattgctcatattacctgtagattcacccaagcttcgggcaatttgggtggctgtgctgggaatgatttgcatcaaaccacctgcacctgcaccagattgagcagatggctgaaatcggctttcttgacgcatgatgccatacgcccaagcaggatcaatacctgcattgcggctgtgttttaaagtactgtcttgataaggggttgggtgtgataatgccgcattacggagataatcggtagtttcgatggcatggatgctacggtgataaaatcctaagtcatgggcttttttggcggcactcagcagtaaagtggtattgcctaagtcgcgtgcttttttgaccgcccaattccattcacgattaatatgttcaaggctggcattgttttgcatgagtagtattgcacgggcaaagtgctgatctgccatcatacgctgttcatcgctggtgctgattgatggtaatacattgccaccaatatcagatagacttaaacgctgtccgatgcgatctttggcaagtagcccatagtaatcgatcccttttgcaagattgtgataaatatgctgtgctttggcttgctgacccagctgttcataagcccgagccagccaatactgccaaatccgctcttgttgttcaacggctgtcatggcactaattgccgtaatgacatctgaccattgaccaaaataaattgctgcttgggcatagtcttctgcttcttcgtaattaaaagtttcacccaagctatttctaaaccaatgtaccgcatccatactatagccatcatcggtgttcatattcatacgcttgaccgcaatgtacgccaagcatactgacgagccatatcagagatgagcttttgtgttctaagttcgtcttgagcaatgtcataattaagctgtatggcagcttctgagtatgaacggtgtgccagcaaactgatggcataaacatatagatattgattggtgttgctgtagctttcttgagaaaagcgtgtcaaaaattcattgggattattgcgaatttcattaatggtttggtagctgacggatatgtttaattgtccaagcaatgagatgatatcgcccgttttatccaaaggtgcttggcggctagaaagttgccgtttatcaatgcgtagcatacgcaaaagttgttcatgtttatcgatgttggtgatgcgtgggttataaaccatttcggtggccagtttatcacataaagattggcggatttgagtatttagccatacattgggtttttggtataaagctcgcagtgaatcacgactttggttaaatcctaaggcaatcgcacaagcttcagattcatcagggttttcaatgctgtctgctacggcacgcacagacgcatagtcaccttggcgagccttaatctcagcatagtcagcggcgagtttttcactcatgacagtgcttggatattgatggacaaactgattgactgcctcgggtgattgaccagataggttataatttagccgccaataggtaggatacatcccaaatagtgtgccttgcatatttttttcgtattggcgtagggcatttgggctacttttttggcgttcgacatcaaaaaattgataaatactaccgtcgttggcatgaccttgtgcacaggcagcttgcataatgctgattgtggcaagcagtgcggtgatggtcaatttatttgctgttttcattattagcttaaatgagttaaattttgcttattctaccaatcactgataaaaaagtccaaaattatccaatacatgcatcaaattgatattgacaaaatgacactggcatattgatatgatataatagacaaattttttattttgcagacccttggagaaaaccatgaccgttggcactttcaatcctaaaactcaagcaaccgccatcaaaaatccagcaacagccttacatgaaatcagggaagctgatcgtgataccgctgtgccaaaaaaagtttatatcgttacccaaggttgtcaaatgaatgaatatgacagccaaaagatgggcgatgttttgggtagtagccatggtatggtcattaccaatgatattaatgatgctgatgtgttgattatgaatacctgctcaatccgtgaaaaagcacaagaaaaagttttttctgaattgggtcgttggcgtaaattaaaagaaaaaaacccaaatcttgtcattggtgttggtggttgtgttgcctctcaagaaggtgataatatccaaaagcgtgcgccatatgtggatatggtttttggtcctcaaaccttgcatcgcctacctgagttgtatgaaagtacaacaaatcaagccaaaactgatatgggtcaaatccccaaaaatcgtatcggtgtggttgatgtctcctttccaagtattgaaaaatttgattttttgcctgagccaagagttgagggttatactgcctttgtgtctattatggagggttgctcaaaatattgctcattttgtgttgtgccttatactcgtggtgaggaattatcacgccctttggatgatgtattggctgaaattgatagcttggctgaacagggtgtgcgtgaagtcaatcttttgggtcagaatgtcaatggctatcgtggtgaaaaagatgatggcagtatttgccgattcagtgagcttctacattatgtgtcatacattgatgggattgaacgcattcgctacaccacaagccaccctttggaatttaccgatgatatcattgaagcttaccaaagtattgataagttggtatcacatctacatttaccaattcaaagcggttcaaaccaagttttagctgccatgaagcgaaaccatacggtcgatgtctacatgaatcaaattgcaaaattacgcaaaattcgtcctgatttacatttatcaagtgattttatcattggatttcctggagagacagacgaagactttttacagacgcttcaatttgcaaaagacttagattttgatcattcatacagttttatttattctaaacggcctggtacgcccgcctctgatttgcctgatgatgtcagccttgaaaccaaaaaacaacgcttggcagtttttcaagagcttattaagcgttcaacttttgagaaaacagaggccatggtcggtcagacactgcgtgtgttggccgaagagcctgcaaatcgccgtcagggatatttacacggtacagcggataatacccgttcggtaatttttaaagcagatactgatcttttgggcaagtttgttatgattaaaatcaccaaggccatcagcatgcatttagttgaaggcgagttggttgaggtcttgggctaatttgatagatacaggcacggagtgggatgtgagattaaataagctgcgtgcttggttaagagggcagtctgatacgccaaccattggtatatactttggagaaaaggcggtaacagcagtttggctagatgagcatgatggacgctatcactggttgggttcggcatgtgtgttttataccgatgtggtggtttctggcaaaattgttgataaagaaaaacttgcccagacgctaagacagatgatgcaaacgcttgggttaagtcaggcaaatgccatcacttgtgtacctgatgatgcagtcatgcagacgctcatcgatctgccagctgatttatcagatgaggatatcgaagcacaaatcttagttgatgctgagcgttatattgggcgtaatatccaagatgtttattttgattttcaagtacttgagcgatcatcagtagcaactcaaatcactctgacagtggcacaccaaaatagtatccatgactgctgtgaagtacttgccatggtgggaatagaggctgtagcagttgatgtccatacatcttgcctggcacgcatgatggctaaaatgacagcacaagtcagtgctttggtggagattaccgatcacgatattggcggttatatcactcatcatggcgtattgctataccagcaaaatgagccaatacatacattgacaaattttggcaatcagccattggatgagcaatcagaacttgatcagttttctcaatttacccatgatgttgatacgcctaaaaattggcccaatcagtcaaccttaacgatgaattttggcgatttgacagatcgattgtccaagacgaatgcatcaatccaaaatgactttgtacagcctttgcaagacaattttatccaaaaaacaccagatattgcgataaaagctcaaactggcgactaccatatccgctttgatgattgggtggatgacatggcagccgatgaactttcatttggcgaagcgtcggcaaatacgccacatatcaaatcatctgatcggtctgaattggaagttgatcagatggccacaaaaatcttatcactgatcaagaattgtcaggcacaaactgttttaccgattgagcggctatacatcagcggcacaacatggacaaaagcatcacagttggcagaggctttacaggcaaagcttgatattttgtgtctgcccatgcatcctaaatacgcggtcaatcacgccatcgaagataatgatatggagcaagcacccatgttaacagcagcagcggcactggctttgacaagatctgaggggattaatcttttgccatggcgtgaagagcgtcgcagtcaagctgatgctaagtttcgtcaaatatttgtgtcggtggtggggcttgctgttttggtgatgatgctgatttttggtgcaatttattatcggctcaatcaacaacaagcaatcaatgatgagattaaaacacgcatcagcaccttggacgataagatccatcaaatgcagcagctcaaagaacagctagatactgcccaaaaacacagtgaggcgttaaatgctttatcagaagatcgacaagttgcgtatcgctggcaacaattatcaaacctaatacctgagggtgtgtatctagacgaaatgagtcaggcggcagatatgcttagcttgacaggaaaggcggtatcgacacaatccgtgtctgcatttgcccatcggcttgagttgtctgggctgtatactgatgtacttgtggtgtctttgcaacaagcagatcaagcgatgagttttacgctcactgccactcagctgccacttgatgccaaagatatgatacagccagcgaacataacaaatcacgatgaaaatactgatgtgaacgagcgtggtaatgaataattttgtgtatcagctacaaagtttttggtatgagcttaatcaggtcaatcgtcataccattgctcaatcacccaaatatatacagctgacggtacttggtttgatcgtgatgatcattggcatttttggctggctacttgcgattttaccaaccattcaaaagcttaatgcagcccaaagtcaagaatctgccttaattgatgaatttgccactacataaagcccagcagtttgaccatctaagccatcaggtcatacaaaaaaatacacaacttgaaaatcagctcaatgctctgccacgcacagcaccgatgagcgagattatcggaatgataaataccaaagcacaagcggttaatgtgcaggtggtgagtgcatcagttcaagcaggtcgtgaacaggattattataccgaacgccctatcgcagtgagtgcgacaggggattatcatgctttgggtcgatggttacttgagttgtcagaggctaaccatttgctgacagtgcatgattttgatctgaaggctggtttgaaccatcagctgatgatgattgttcagatgaaaacttatcaagcgaacaaacgcccaaaaccagttgctcagcaggtgcctgatgttcaatgaatattatcggtggggcattttgggtgcttggatttgggttgggattggatgtgctgatagcaccagtcaagttgttgatgataagcttgcacatattacccatgaagagcgtatggcgatcagtgagcctgtgccgatacccttatctgtgccgatgatatatcagcaaggcaaagatccttttatcaatccttatagaaatgttgaggttcttgataccaatcatgccgctgatcagcaagatgagccaaaaaccgaatctaccaaagcttggcctatggcagacactatgccatctcagccatctgatactcatcagtctgccaaggctcaggcacaagtcttcaaaggcgatccgatagtcattgataccaaccgtgttcgagagcctttagaaagctatgagttatcaagcctacgctatcatggtcgtatttttgatgatgttagacttgtggcactcattatgagtcctgatggcatcgttcatcgtgtgagtactggacaatatcttggtaaaaatcacggaaaaattacccatattgacagtcgtacgatacatctgattgaagcggtcgctgatacacaaggtggctattatcgccgtgatgtaaacattcattttattcataagcaatgacacatggacaaaaaatttttaaaaaatagcttggtaatcgccgtgatgctcggtgtggttcatatggaggtacgtgctgatactcatatcgatcatgtgtctgttacccaaacagcagagcaacattatacaggcaagcctattagccttgagtttgccgatattcctgtacgagcggtttttgatattttagcaggttttacaggtattaatatcatcaccgatgatagtgtgacaggcagtatgaccattcgcttgatgaatatcccttgggatcaagcatttgatgtgattttgcaaacacaaaatttatcagtattaaagcatggtaatgtatggctgatcagctcaaaatctatccaatccaatcagccgacaataaccgaatacattcgtctaaactatgcacttgccgatgatgtggcaacactcatcatgggcgaaaaaacccagcgtggtaatgtcaatcgaaccaatcaccgtgatgttatttatcctgaagcaccattatcacgggcctataatacccagactgatgaacttattaccaccgctgtgcgtgggacattactgtctgagcgtggcacagtgacggtggataagcgtaccaatactttaattatccaagatgtgcctgcaagcgttgccaatatcaaggcactgattgagcgtattgatatccctgttgaacaagtgatgattgaagctagaattgtttctgctaatgaaaattttgggcgaaagcttggcgtaagttttggggcgcatggtcaaaatggtaaagtgcattatggcggctctcagggaagtttgtggacaatgtggcaagagggtgtggcggcaggtggtcatcaaaacagtcatctgaatgttgatttgggcgtagataacgccatgggacgcattgcttttgggctgttaaatttacctgatatcattttagatttagaactctccgccatgcaggcagaaaatcaaggtgaggttatctcaacaccaaaagtcttgacggctgataaacaaaccgcgcgtatttcatcagggctacaaattccttatcaagaaaccacgcattcaggtgccagcacaacaaaatttaaagaagcgtctttaattttggaggcgacaccaaatatcacacctgatggtaaaattggtcttaagctaaatatcaaaaatggcaatccagtaccaacacttggtcatatcgccatccaagaagatgccatcgaaacgaatgtcatcatcgaagatggacaaaccgtcgttcttggtggtatctatcgcaccagccagaatgaaggtgcaaataaagtgcctagattgggtgatatgcctgtgcttggacgattgtttcggcatgattccaaagcgcatgataagtcggagcttttgatttttattacacccaaattggtaagatagctggcattatattggtcaataaaataaatgaaatttttatctaagtaatcggtatctgaatggtcaatacataaaaatactggtaacaaattgccaaacattgtatgataagataattttcattcattttattaagtcaagttggtgcataaatacccatcatggcgaatatgttatattaattggaaaatcacaatgcttgatgacgattcggctttcattgaagaggtgatggtcgaaaaagcaggtaatgccttatcaaaacaactacctgcgatttttttggtgggacctatgggtgcaggcaaaacaacgataggaaagctgcttgccaaacatttggggcgtaatttcattgattgcgattggtatatcgttgatcaaacgggtgctgatatcccatggatttttgaaaaagaaggtgaggaaggctttcgagatcgtgaaacacgcgcactacaagagctgaccgcactgcctaatattatcatggcaacaggtggtggggcggttggacgcaccaaaaatcgagaactgcttaaaaaaggcttggtgatttatttagatgccagtgtcgatacacagctggctcgtaccaaaaaggataaaaaccgcccactgctacaggcacaaaatccacgagcagtacttgagtctttgtacaaaaagcgtcatccgctgtatcgtgaagtagcagatatcatcatattgactggacgagcatatcccaagcaaatgatcggagagattttagaagtgcttgaaaattatgctttggatcatgcacccaataaattaaaaaccgatcaacacgctaaggaaaattcatgacccaagcaccacttattgtcaaaacccaacgccatgattatcccatttttatccgagcaagtgatgatcaaattgacttggttagccaaattatcccatttatcaccgccaaacaagtccttattgtgaccaatgatgtggttgcgcctttatatttggcacaaatgcaagaaaggctattatctgctggatttcatgttgaggtatgcgtactgcctgatggcgagatttataaaaatcaagacagtattaatgcaatctatgatgtgctacttggggtgcattttgcacgagattgcacattgattgcactgggcggtggtgtgattggtgatatgacaggatttgcagctgcaagttttatgcgtggggtaaattttatccaagtacctaccacgctgcttgcccaagtggattcaagtgttggtggcaaaacgggcattaatcatccatgtggcaaaaatatgattggcgcattttggcagcccagctgtgttttggcagatatgacgacatttcaaacgctgcctgagcgtgaatttgcagcaggcatggcagaggtcatcaaatatgcactgattatggatgatgattttttgatttggctggaagaacatgccgatcaaatcaatgccaaagataggcatttacttgcagagatggtttatcgctgctgtgattttaaggctcaaattgtcgctgctgatgagcgtgaatctggcaagcgtgcgttgttaaattttggtcatacctttggtcatgtcattgagacacatcaaggatatggcaaatggttacatggcgaggcggtggcagctggcatggtgcaagctgcccaaatgtcgtacagattgggtctaattcgtgcttgtgatgtcgagcgtattgaaaatatcattaaaaaatatcatctgccgaccaagcctcctaagatagatgtcgcacaagcgctggatctgatggggcatgacaaaaaggttaaacaaggtcaaatccgcttggtgctactgcgtcgtatcggtgatgcgtttgtaacagcggattttgagttatcagacttagaggctgtgctggcagggcaaataacgaccgcaagtcttttagttgatgaatgagtgggtaaaattatgtcaaaaattcccatggtgaatgaaaagtattttcgtcgtcaggcactttattggttgattgcggcggctatcatggcaggcttgtggttgattgtttggttgaccagctccgtaccagcaatgattaataaacaaaacgccaatcaaacatcgtcctatgttgcgacattgccgaccacaatcacagcgttaaatgagcttgatcatgttgttaagcccatggataattcggcacttgtgcgagacttacgcaactatccacctgaatttaaggacaaagtttattttaatggtattagtggtcgttataccattgagctgatgaatgttaccgaaaatgaagttatcgtggattatctaaacagccgagaagatcgtaacaattttgcttattttcgctatactgatgccaatgataataagcgatatgtactgacttatggtaaatttaccagtccagctgatgcagaatctgctttgcaaaccgtaaattttagactgccaaaatcagtgatacaaaagaccaccaaaatctctgagttggtcgcagtaatggacaattatgaattgggtcaagatgtggtggatttggcagacttccagcctcgccgagttcgcctgcaagcgacgcgtaccgaaattccagtcaaagcggccacgccagcagatgaagaattggcacgcctaagccgtgagcgtgcattacaaacacaaatttcccagcaaactgagtcggtcaggcagccgactgatttggatatccaaaacgatatcaatcgtttgtctaatcaaagatctcaagtcagctctagcgatttgcctatggcaccaactgcacgcccacagtcaccgcagcaaacagccgatatagtacccaaaaatgaaatatctaaaggcactgcaccaacccaaagccattcggcagagacagaatcgcaataaaagatgggcaaggatatcctatgtcaaatgaatatgcaaaacagattttaaatgcacttaaggcaggcaatgatcgatatgtggaaaatctatcaagtaccaaaaaaacgccattatcaccaccaactttggttaaagagcacaaacccaatgccattattttggggtgttcagatgcgcgtgtacctgttgagctgatttttgatcaaggtttgggcgatttgtttgtgattcgggttgctggtaatgttgttgcacccagccaaattggttcaattgagtttgctgctgaaaaatttgggacacgattggtggtggtgctcggtcattcgcattgtggtgctgtgaccgcttgtgttgaagctttaatcaatccagatcaatattattcaccaaatttacaatctattgtagatcgtatccgccccagagtgttgaacttgcatgaaattgcgaccgcctcaggtgatgatgtggatatggatgaactgattgaacgctctgtgcgtgccaatgttggtatgtcagctagtcaaatcaagtatggatcgagtattatagaagacatggtcagacagggggatttgctggttattggtgctgaatatgatgtcgacacaggcaaagtacattaattagatgactgaccaaaaacaaacccatgattaatgacaaaaggagagtatgatgaggattcaacaacccaaaaatgctttggctgcagaaggtgttaaagacattcctgcgcagtcagagggttatattcttaatcacaccatgctaagaatcaaagacccagttcgatctttggaatattatactggcgtacttggaatgactttgctaaagcaca

SEQ ID NO: 12 - DNA, 21410 bp, Moraxella catarrhalis
ggattctgacacctttattgatgctattttttagttttcatatgatggtgatggggctgttggtggtgtgggggaatttgcctgttcaaaattctgcttttatgctttggcataggttatcaggcggtcgtgttacccaaatttgggtagattatgatcacattgccaagtctgccaagcaagctgccattgccagcgaagatggtaaatttgttgcccattatggatttgattttgacagtatgcaaaaagccatgcaccgtaacgagagtcagggtgcggtatcggtaggcggctcaaccatcagtcagcagctggcaaaaaacttatttttgacatcgcatcgctcttatgtcagaaaagcagaagaagccatcattgttgtgatgatggaaaccttatggtcaaagcagcgtattttggaggtatatctcaatgttgctgaatttggcgaagggatttatggtattgaagctgcgtcacggcattattttgggcgttcggcagcaaatttaagccgtgatcaggcagctttattaatcagtttgttaccaaatcctaaatattatggtaaaagacccaatgccaagcgtcttaaaaataagcaaaggattatcatgcggcggatgaatggtgtgcagattccttgagactgtttggctatatatttgcttcatgtgtcatgcaattatcattaatttttggtattttaataaagatgcttaagcactcacatggcagtagggcagccagttatgagttagttaagataaataataacttaattttaatcattaaaatttaacatgaatcatcaatttcgccttcaggcattatacacatctatccgccaaattttagcaacttttagggaatatgccatgattaacactatgaatgatgtcaatcaagccaatcacgctgatcataccaacccaatgacgcagattgatcatttatttgacgaaaaaggtgcttttacgcctaaatgctatattaaccgtgatttatcagcgttaagatttcagcttagagtattggcacaagctgccaacccaaatcatcctttgctggagcgtatgttctttttgaccattttttcctcaaatttagatgagttttttgagattcgtgttgcaggcttattgcaaaaaatgaaacaaggcgatcaggtgagtagcttagatggtcgaaagcccagcgaaatcttacaaatcatcagcgatattgctcatggtgctgttacgcagcagtatcagattttaaatgatgaaatcttaccgcagcttgccaagcatgaaatccgctatttgcgtcgtgatgagttgaatgccaagcagcgtgcatggctaaaagactattttgtcagccaagtcaagccagtattgacacccatcagtattgaccctgcgcacccatttccaagactggtgaataaatctttaaactttatcatcagcctagaaggcaaagatgcctttgggcgagatatcaatcgtgcgattgtgccagcacctcgttcattacctcgtgttattcgcttgcctgatgagattactgacggcaaggagcatcatgtgatgctctcagcggtcattcatgaacatatcaatgagttatttttgggcatgaaagtaacgggttgctatcagtttcgcctaacacgcaacgcagatttggcactggctgacgatgttgatgatatcgccaaagcgttagaaggggagcttgataatcgccgctttggtcatgaagtgcgattagaggttaccacaaattgccctcaagacatttgtgattttttattagatgaatttgagcttgataaatctcagctgtatcgtgtcaatggtcctgtgaatttaacacggcttttgaccagctttgatagacctgaattaaaatttaagccctttacgcccgccatgccaaaggcatttcgtgatatagatatgagtagtgcaggctctatgtttttggcaatatcacgccaagatgtgcttgttcatcatccatttcataccttcaatccagtgattaacttactgtggcaagcagcaagcgatcccaatgttcttgccattaagcagaccatttatcgctcaggggtaaactctgagattgtacaagcacttgccgccgccgctcgaagtggtaaagaggtgactgcggtcattgagctgcgtgctcggtttgatgaagcgtcaaatatcgctgtcgccaatatgctccaagaagcgggtgctgtggttgtttatggtatcgtaggctacaagacacatgccaagatgatgctgattgtacgccgtgaaaatggcaaaattcgccgctatgtgcatttgggtacgggtaactatcatgcaggcaatgccaaggcgtatacagattatgggctgtttaccgctaatgctgaggttaccgaagatgtggcaggcgtgttccagcagctgacaggtatgggtagaccactgccatcaaaacaaattttacatgcaccatttacgctccatgataccttgatgcgtttgattgatcatgagattgcccatgtcaaagctggcaaaaaagggcgtatcatcatgaaatttaatgcactcaccgaatgcaaaatcattaataaattatatgaagcaagtatcgcaggcgttcaaattgatttgatcgtgcgttctatttgctgccttcgtccgcaagtggtcggtctgtctgagaatatccgtgttcgctcaattgtcgggcgttttcttgaacatacccgagtatattattttgccaatggtggggaagagcgtctgtactgtagctcagcggacttaatggatcgaaatttattgcatcgtgttgaagtggcatttcctgtacttgataaaaagatatttaagaaaatctatgaagatggcttgatgaattatctaaaagatgatgtacaggcttgggagctgttgggtgatgggaagtggcaaccgcttttagtatcaggtggcacacacgatgcccaaaaaaccttacttgagaaaatcaccttgtgaaagtagatgataaaagtagatgataactgcccgtgtggctcactaaaatgctatactcactgctgccatcgatatcatggcggtgatgagtttgcacccactgccgaatgtttgatgcgatctcgctacagtgcgtttgtcattcaaaatattgattacatcgtacaaaccactctaccagctttgcaaccgcttttggatgtcgctgcactaaaggcatgggcagagcaaacttggtggacttatcttaagataatatctactacgcctaaaattggtaagcgtcatgcccaagtgcatttttgtgcgtattttgaagagttgggcgttcaagggtgtcataatgagtgttcggcatttgttaaaatcaatgaaaatggacaaaatcggtggtattttcttgatccgacattgccaatcactttgagtggcaagcagccatgtttatgcggttctggcgaaaaattcaaggtctgttgcggtaaatttttataaatcattgtttattaatcatcatgatatctaaaaggcgaggtatcaatatcttgctttttaattacccaaaatatgctaaaataacgcatttatattaatccgataaaggcagtatcatggcaggtaataccattgggcaactatttactgtaacaacctgtggagagtcgcatggcacaggtttgatggcgattgtggacggcgtgccaccagggcttaagcttgatgctaaagatttacaatgtgagctcgatcgccgaaagcctggcacatccaaatttgccacccagcgtaaagaagaagataaggttgagattatctctggtgtctttgagggacatacaacaggcacaccgattgggcttttgatttataataccgatcaaaaatccaaagattatggcaatattgccaatacatttcgcccaaatcacgccgattatacttataccatgaaatatggttttcgagattatcgtggtggtggtcgttcatcagctcgtgaaacagccatgcgtgtggcagcaggtgcaattgccaaaaagtacctcaaagagcgtttgggcatcgtgatacgagggcatgttacccaaattggtacacaaaaagcccatgcacttgattgggacttggtgaataccaatccgtttttttgtggtgataaagatgccattcccagatttgaagcactggtgacatcgctgcgtgaacaaggcaccagttgcggtgctaagcttgagatatttgccgaaaatgtccctgtcgggcttggtgagcctgtttttgatcgtctggatgccgatattgctcatgccatgatgtcaatcaatgccgttaaggcggtagaaattggcgatggttttgatgtggtagctcaatttgggcatgaaagccgagatgagctaacgcctgatggatttactggcaatcatgctggcggcattttgggcggtatctcaagcggtcaacgcattcgtgttgccatcgctctaaagccgaccgccagtatcaccacacctggtaaaacaatcaatttggctggtgaagcggttgatgtgattaccaaaggtcgccatgatccttgtgtgggtgtgcgtgccacaccaatcgctgaggcgatgcttgcaatggtgattttagatcattatttgcgtcatcgtgctcaaaatgctgatgttgtgccaccaattgaaccgatcaataagccagcaacatcctattagtcaaactttgtaatatcaatgggtaacaaatcaataaaatggctaaaaactcatcttttttagccattttatttataatgatattatttaaagaacagtaattttttttaatgtatgacttattgctctgtccagcgtttttggctttctttgatgacctctttggcagtgttggcatcaaaaaagccctcaaccacagttgagcctggtttttttaagtctttataatgactaaaatgaaattcaagttgctttattaactgtggtggtaggtcgtcaagactattataggcgttgccattattacgatcatcggcaggaacaacgatgactttatcgtcgacctcgccatcatccacaaatttcattaccccgatgactttggctttaagaaaaatacccgtcgtcaaaggctgttctgtgatgattaaggcgtctaattcatcaccatcttcatctaaggtttggggaataaagccatagttgcatggtttggcaaaggcaattggctcaacacgatcaagctcaaagcatgccaaatgacgattccactcaattttatgatttgagccagtcggaatttcaacaaccacattgatgataccatcatcattattgccagcatctagaattttattaaagtcagccatgatttgctccataaagctaataagataataaaaaccaagctcattttaacgtatcttgggttcgtaattcaaccaaaccagcgtgccgacgagcaatatttttaatcaactgggtgataaatacccccatatcatctgctgtaaattgcccaaaacttgataatttcgccattggcatccctgcatagccacaaggattgatggcatgaaaggcacttaaatcattgataagattaatggcgataccatgatagctaaaaccttgcttaatcttaaatcctaaacttgcaatcttgccaagcatatcgcctgtatgattataaatatacacaccgggtgcatcacggcgtgctttgacggtgagtgttttgggtaaatagtgtgccacaatatcaatgatggcttgttcggcatggctgaccaagtctcttacgccaaaatttaaacgatgtaaatcaaatagccaatacacgaccaattgaccatctccatgccaagtgacctgaccgcctcgatctgtttgaatgatgggcgtgtctgtacgatataagatatgctcaggtttgcttgcttgcccaagtgtatagacattttgatgctcaacaatccatagctcatcagcatgatgctgattaattttcttattctcaatgcgttttaatgtgtggtttagcatggattcatgcacggtctgataatcggcattatccaaaagacgcaccgtcagcgtatcggtggacaaagcaagtaaatcaaggtgtgaagatggaatgattttattcataataaagcggtttggtttgtcagatggttgatgttatattgcttttattgatgatattagattggtgtcaaagtttgtgataatatgctaaaaacgaatgtaattatgataaggtgtttgggataagaatgcaagatgattgataaactgatgcacaatcaatagtttttgtgtatgataggctgacatttacctaaacttggataaaacttatgagcgtgattttaaatgataatcagcccatcatcacctcgctgcttgataatgatttgtataaatttaccatgctacaagccatgttacaccaattcccacaaacgcatggcgtatatcgatttcgttgtcgtaataatcatgaaaccgcctttgctttgggtgagattaaagcagatcttgagcagcagctggattatttgtgtcagctaaaatttactcaagacgagcttgattatctgcgtggcttaagatttatcaaatcagattttgtggattatttagaattattttcactcaaacgccgcgtttatcaccgtttcaactgatgaaaatcattttttaaatattgacattgaaggtccaatgatccaagcgatgttttttgagatttttgtactttgtcttgttagtgagctgtattatcgccgcttggcaactgatgatatcatggcagaaggtcaaaaacgactggatgctaagattgccttattgcatgagtatcacgccaaacaaagcacgcagccaatgcctgccgataacgcttttacggtggctgattttgggacacgccgccgatttagtaaagcttggcaatatcatgtggtcaaatcgcttcatgaggcttgccctgtcattgttcgtgggacttctaatgtttatttggcaaaacagcttggtattaccccaattggcaccatggcacatgaatttttacaggcatttcaggcattggatgtccgcctaagaaattctcaaaaagccgctcttgaaagttgggtgagagaatatcgaggtgacttgggtattgcattgaccgatgtggttggtatggatgcgtttttgcgtgattttgatttgtattttgccaagttatttgatggtcttcgccatgatagtggcgacccatacgaatggggtgataaggcgatcgcccattatcaccaactaaaaattgacccaaaaaccaaaatcttgacttttagtgatggtctaaccctacaaaaagcatgggatttacatcagtattttaaagataaaatcaaaacgggatttggaattggtacaaatttaacgaatgatttgggtgaagtgcagttaaacattgttctaaaactggttgcttgtaatggccagcctgttgccaagttgtcagacagccctggtaagacaatgattgatgacgatacttatttggcatatcttaagcaggtctttgaaatcaaagcataaacataaatataaacattaaacagccaaatactgactcagtttgccatttggctgtttaaattttatgtattgttcagtcaatctatgaaatatgtataaaaaattattcagatgatttatcttgcgtggcgacttctgcttgttcaaacgctgattgcagtgcctgctctaccgcttcaatacgagattgacaaacacggtatgccgccaaagactcctcaaccagtgttactaagttatcaatatctaaattatcatagtgttcaagtttatcggcattagattgtaagatttggtaagcgtctttaaagtttttgggggtcgtgtggctcatagtttttatcatttggtcaaagtattttggttattgtaacgaatttttgggttgatgttaagttgtttgttcatttaaaccaaaaagataaggtttatcaaaaagatggataaaccttatctattattatcacaaaataattgcaaattatagtatttttgttattatatttttattggtaattattgaattttaaattgataaaaaattatggtcaaggacttggtatggcacaatcagatcaatcaaaacaaacagactttacgctaagaacggattttcagcatgatgatgatggcgtaccaccatcaggtgaggtgcgacccgatgccatcaaaggcatcgtgattaccgttattgcagccatcatcgcttatgtgctgtatgcttttttaccatttgagcctttggcaaataaaggcttggcactactttcattcattggtattttatggcttaccgaagcgatccatgtgaccgcaacagcgattttggtgccgctgcttgcgttgtttattggtattcctgattttaataccaaagcggcattaaccagttttgccaatcccatcatctttgtcttttttgggggatttgcattagcagccaccttacatgtccaaaagctggataaaaaaattgcctatggcttgattgggctggctggtggtcatttggggcgtgctgtgatgatgatgtttggtgttacagcagcgttgtccatgtggattagtaacacggcgacagctgccatgatgttgcctctggcaattggtttgctggcccaagtagatgccaacaaagatcgtaatacctttttatttgtacttttgggcattgcttattctgcctctatcggtggtttgggtacattggttggctcgccgcctaatacaattgccgccaaagagcttggtattgattttcgtgaatggatgagttttggtttaccaatggcaattgtgctgatgccgtttttgattggtgcgatgtatgccatcttacgcccaaatttaggtcagcgtgttgagctgggtactcaagaagccattccgatgactttgccacgcattttaacaacgattatctttattgccacagcagcttgctggatttttggtaagcagttgggtgctgttttaggctttagtaatcctgatacggtcatcgctttatttgctgcagtggcggtattgctgcttggtttggtcagctggaagcaaatctcggataatactgactggggcgtattaatgctctttggcggtggtattgctttatcagatgtgatgaaagatacgggtgcatctgctgtcttgggtgaaagtattgcgacattcttgggcaattcatcaactttattggttatttttgtgattgcagcattcatcatctttttgacggaatttaccagcaataccgcatctgctgccttacttgtgccactgtttgcaccaattggcgttcagcttgggctgccgcctgaagttttgattatggttatcggtattggtgcatcttgtgcatttatgatgccagttgccacaccgccgaatgccatcattatgggttcgggtcatgtcaaacaaaaagatatgatgaaagttggcttttggctaaacttagttgccatcgtgattgtaaccgcatgggcgtatctattcttggcttaatgtgattgtaacaacaaatccccaaatgagattttggggattttaatctttttgattttttgtaaattctcattgacccttaaaatcaaacaaccatcactcaaaggtggcttaaaaaggttttttggggcttgaattagttttggtcaaactgtgcttggcataatttgataaactcatgaccaaatttacgaatttcgctatcgtcacgcaccgcaatccagctggtaaatcgcccaaaatggttcacaggaatggcaaccaaatcaggataatgcttaggctgatatgccatctcggcaataataccaacgccaagccctgatgatacataagtgctgatgacatctgaatcaagtgccgccaaaacaatgtcaggataaaatcctgctttttcaaagaccttatcaatcgtgccacgacccgtaaagccgccatgataagtgacaatcggataactggctaaggtcggtaaatcaacaccatcaggcacatcggcaaattctgccagttcatgtgtttttggaacaatcaccacatgcgaccaatcataatagcgatgacaacgaagcacggcattattaagtagcgactcggtggcaataccaatatcggcttgaccacgaatcaccatttgagcaatcgtttcaggatcagcctgctgtaatactaagttgactttatcaaatttttcacgaaattctttgacaatttggggtaagacatagcgggcttgggtgtgtgtggtggcaacagtcaaagtgcctgcttgagcattattaaaatcaaggcttaaattctcaatggtacgaatttcagcaaaaatcgcttcaatgtgtggcaaaagtgcccgaccgataggggttagacctgttaaacgcttaccttgacgcgtaaatacatctgcttttagctgattttcaagtgcagcgatttgcttagataggctggattgactggtgtgcaaaagctcagctgcttggctaagattatagccattcaccacagtatgccaaacagtctcaagctgtttgagctgaatttgtagatgacgctggttgatgacaatgtcgatagccataaaattccttgagtaaataagttgtcaagataaattggctcatcataccgaatttttacccaaaaaggtaaaaaaatttactaaaaaaacaagaaaagtatacaaaattcagctaattcaggtaaaatgcaaagaaagatatctcctatttttacgccattttggtattattatttgataccattaaaattggatgacatgattatgagcaggataactcaatcttacacaaaaccaagtgcatggcaagcattttatcacgcatattttaataaacagtcagttgcactgttatttttaggattttcagcaggcatacccattttattaattttctcaagtttggggctttggcttcgtgaagcaggcattgaccgtgcgacagtgacgatgtttagctgggcagcactgggctattcatttaaattcatttgggcaccgctggtagatgcactgccgctgccgatattaactcggctgcttggcagacgccgcagctggttgctattcacccaaattttggtaattactgctttggttttgatggcgatgaccaaccctcaaagtggtgaggcgatgttaagcatcatggcggcaggtgcagttttgcttggattttcttcagcctcccaagatatcgtgattgatgcgtatcgtattgagagtgcacctgctgatatgcagcctgctttatcggcaacctatgttatgggttatcgcattgggatgattgtatcgggtgcaggtgcgttgtatttggcagatttttttggttcaatgatggaggcttactcttatctggcatggcaaaaaacctatttgattatggcagctgtcatgggtattggtattttgaccacgctggtgatttcagaaccaaaaacagtggttaagcccatcacccaaacctcaaaaaacgacctgagacttgttgttgtctttatattgtctgtattggcattcatcttggtatttcgtggcatgggtagtatcctacctgagactgatgatgttttactgcaatttgtctatggaacagtgagatttatgcttagtatcatcgcttttggtttggcaagttttggattggtccaagccaaaatcgcccccaaagagatggttataaaaacttgggttgatcctatggtggatttttttcatcgttatggtcaaaaggcagtgcttttattggtattgattggcttgtatcgcatcagtgatattattgctggtaatatctcaaacattttttatcaagatttgggctttagtaaaacccaaattgccgatgctgtcaaagttgtgggtgtggttgcttcgattgctggcggatttgttggtggctggcttgcccaaaagataaatatcatcaaagcgatgagtcttggtgcgattttggcttgcacaaccaatctgttatttatttttttattttatacgccaactgtgccgatgatgtactttgctgtcattacagataatttggcagcaggtttggccagtaccgtattcattgcgtttttatcagcattaacctccattcggtttactgcggtgcaatatgcattattttcatcattaatgactttgttgcccaaattaattggtggctattcaggtagtatcgttgatgcaacaaactacgcatttttctttggatttacctttgtgatcggtattcctgtgttattattgatttatttggttaataagcatattgatatcaaccaaccacaaattgatgaatgagcgatgcaagtatccaatcggttagccctaacaggtctaaccattaaacaaattcgtgcaatctttaagcagcttcagtctgatgtattaccaatgcattggcttgatggttggttgatgcatgtgcttgataaaccctttatatttctgatgacggatgaagattatcagccaactttggaggaatcatcaaaaattaccgcaggtattatgcagctgtcagcaggtaagcctttggcatatctgactgggcaacaaagcttttgggggcgtcattttttggtgaatgcccatacgctgatacccagagctgatactgaaattttggttgagacaatcttaaattatgccaaagctcaacaaaaaatccgccaaacagacaacaaaaatttggttaatattttggatttgggtacaggtacaggttgcattggtattacgctggcactggagttggaatttgctcaggtagttttggtagatatctcttctgaagcacttaaagttgctgagcaaaataaccatcgcctgaatgcacggtgtcaacttttgcaatcacattggttgcagaaagtcagtggtcaatttgatattatcgtcagtaaccccccttacatcaaagaaaatgacgagcatttggtaaatcttaagcatgagccaatcacggcacttgtggcagctgaagatggtttgacagatattcgccatattattgaaacaggtagggcgtatctcaaagatggcggattgatggcaattgagcatggttttgaccaagcggaggcagtgcgtaacttgtatttgtcatctggttatcttgatgtatatacgatccaagattatgggggtaatgacagagtaacgcttgggagatataaaaactgtggataaactgcggatcaataaggtgtgttatggacagtcatacagttgatggtcatcttactgatgatgaaatgatgcgatatgctcgtcaaatcttgctagatgattgggatgtcacatcacaaattcgcctaaaaaatagccatgcgattattgtgggtatgggcggcttaggctgtcctatcgcacaaatcttggtgcgagcagggattggctcaatagatatcattgatcatgatgttgttgatgtcagtaatttgcagcgacagattttatacactgcgttggatgtcggtaaatctaaagcgatggcagccaaagatgcactacaaaagcaaaacgaatgggtgagtatcaccgccatcactgataaaatcacccaaaccaatactgatcaattcatcaaacataccgatcttgtgattgattgtacggataattttttgattcgtgatatattaaatcgcacttgtcatcagcacaagcttgcactgttatcaacatctgccatcgctcagacaggtcagattgcgctttatacgactgatacggcgtgttatcagtgcgtctttggtgatgcgttaggcgatgagatgaactgtagtacctctggtgtgttggcaagtaccgtatctgtgattggtgctttggcatcacaggttgcacttagttttttgggcaagcatatcaatccgattgccaatgaattgctgatttggcaaggtgagcaatttcaattaaaaaaactaaacatttgccgtgatgagcattgttcggtttgtggcgcatgaccgccaaagcagtttaagtatttttgtggtactcttgaatttacggtctttgatgaccatttcaattatttcataaaaaaacgatgattatgccaacatttttaccaaaaaatccagtatctaccgccaaaaaagcactgaaccaaagtgtgcatgttttaggtcgtattcaaaaaactgccagtgttgcaggcttgtcagcacttagaatggctaagggtgataaaatggatgcgtaccttttgcgtgaagcgtttgagcagatgggcgtaacttatatcaaacttgggcagtttatcgcaagcacgccttctattttccctaaagcgtatgttttggcttttcaagggtgtttagaccagacagcgccagtacgatttgaacaaatccgccaagtgttgattgatgaacttgaaacgcctgagcgtggattgggtgatattttttcttatattgaccctaagcctctggcatctgccagtatcgcccaagtgcataaagcggtacttgctgatggcagacaagtggcactaaaaatccaaaaaccaggtgtagatacggtcatgcaaaccgatttgggggtgctgcatagtgtattttgggtgttagaaaaagcagtgcctagcctaaaagcggcaaatcttgcaccaattattgatgaaatgcgtgccagaatgttggcagaaactgactttttggcggagagccatcatattgataaattcttagcacatctacatcaagtgggtaatacccaagtgactgcccccaaggtacatcatagattatccaccaaaaaggtgctggtcatggacttattagtcggtaagtcattggtcgatgagtcgcttgtttgggatggtacagtaggcaaagacagtaaaaaaatcatgaatgatgttttggatacatggtttttatccttgatgatgacgggtgaatttcatgctgacttgcatgcaggcaatctgatgctacttgatgatggacgaattgcttttttagactttggcttaatggggcaaattcaaccaagtagcctgcaggcatgttttaatttggtacaaagcctacaaatgaacgattatcatggtatggcacaagcgatggtcaatattggtatgacgcacgcacctaataagatgaatattgatcatctggcaaatgacttacggcggatgcttggtaaaatcatgcctgagtccacgcctgcaccagccaataacgacagcctaaatgtcatgatgctagaaatggtcgatattggtaagcgtcatggtatccatttccctagagattttgcattattaaccaagcagcttttatattttgaccgctttatggtaactttggcaccagatatggagctgtttgaaggcaatcgcttggacttggttaaattgaattaatctgtctgcgtgcatgtgattgggctagattttaaatttaatacatggacttaaaaatttggacattgatcaaacttttttagtgatttatgtccagtctttgtaagtgcatcactaaaatttctgccaaatgttgtgccaagtctgatctaagagctgtcttatcgtcatcattgtcagttaagcttgagtgattgggatggctgcgtgcttttttgattgggcttggtaatttatcgctctgccaaggcaggtttttatcgctggcggtaatatctaagagactggcatgcccacgatgtcttaggtggtggtgcagattttgggcacgagcggcaagtaaagtcatcgtcggtgcattaatcatgagtgtttgtacgcccatggctttatctttgagtgtggtggaattgggcagcagtccaccaatcacaccgccgatggctgtgccaagcccaaggcttgcacccaaagtcgccacatcaatgcctgcaccgataatcattcccgtgacgctaccgcctgctgtgcgtatgccatactgagccaatagctcgccatcaaacacatcttgggtttggcttttgatatctgggcaatcagagacgatattttgatgataaaactgatacaaatttaataagttatcatgcaagacagattcagcttgacgcactgcattttgcatctgtcttaatgtcggtgtcgtatcagcaccgcttgcaattttttggcgataagcggcgacattgattaaaaaatcagcgatcatctcagagccaatttccagcagctcatgccatgtatcactgcgttcttgcttgagcttttcgatattttgatcgtggttggacagtaggctaagatttgaccataacgccatttcattttcaaagtcaaaagcaaccgtatcaaaggcattgaccacatgtaacgcacgccgtgacagcatttctcgccaagcctgcatatgatgattggggtcattgatgaagttaaagactggcaaaattggcgtccccgaaccagccaagatggcaagctcatctttatatttaccaagtacgggttctttggcatcaatgatataaagtgcaatatctgcctcaagtaagcttttgatgaccttggcttcttggctaaaatcaccctctaatcgtgcatcattatgatgaattgcttgtaaaaacacagataagcgttccataccatctgcacgaccatcagtataattctgcaaaaaatccatcacacctgtggcgtcctctaatcctggtgtgtcatgtaaagtaattagtggtacattgtctttgcttagtatatcaacagcgacgacatgccgtgtagtcgctgaggcgttttttacttcaccaaaatcgctgtctcgtaataaggttcttagtagcgatgttttgccgacattagtgtgtccaatgatagagattgtcgtaaggttcttgattttattaacattaatcattgatattttctttattttaaaaatatgtacacaattatgtacacatgattatgggatagggtgtgttagaatggggtattttgttgcattatagctttgtgttggacgaaaaaaaagcccaagactgggcttttatttggcagtatgtttcagttcccatgtatgaacttcttggcttagataacgcttgacgccaccacccaatccgccgcccatcacaggccttggaaatggttcaccatgagggtagcgtttttcccatcggtttaaggtcattttacaaatgccaaagatttcgcaaatttcattagatgttaaatactttttcataatctagctccatttaagttctaattttctcatacactctgggcggtgcacttgccaagatttcaatgcagtatttgttcattcttcaatctccgtaatgacttccccagtcttgatatcgaatagaaaatagataatctgcgttgctttaggcgttttttcagcttcttaattttcatgctctgccgccaatgtgttcaatcttgcatccaagtgattatctagcgactcaaagtcatctgggctaagattgtgctgttgcttaaataacatctcgcgcgcagcattggcgttatccaaagtcacatcagcaatggagtggcgcaaatcaaaatacagttttttggctttgtaagcagacagcagattttgacgctgactttcatcaattgatcctgattcgcggtacttagcaacttggtgggctagctctgccagctcatcgagatcatgggctttgccaatttgttcggcaatggatgcggtatcaatgtgctcaatttgagcgacatgactaacagcttgatttaccatgtcgttaatatctttgaccgtggcttgaattggctttggtgcattacctttttctgacagctcatcaggggtataaacgcccaaaatcacatcagggcagtgcaggcgcgcccaacgcttagcacccaaataagccagctgctgtcttgggtcagctatccataggggcgagtttcgcacgctgcccacctgtgccatactgatagatagcgtggtcggctctgtgtcgccttgtatgatggctgagactaccacgcccacatcatctgacttatcatctttggatttgacttttgaccagtcaccaaaataatcaaatttgagtcgcccaacaattggcgctttggcattgattacggcgatgaccaactgagcttcatagcctagtgtgccattgaccagatgggtcttttgagccacggcataaggatccatgccccagcggattgattgaccaataatcgcaaagcaatctcccactttgccttgtaggtgcttgggaatggtgcaagagcctgacgccatgatttcggctaggcggtggcatttgttgaatagcccatcatctaggacgatttggttttggctggtggttagttcgttcataatgtgattccttgtttgttttcacggtaaatgtggataaagtggctcatgacggcatcattaggatgcatgatcatctgatccagttcgcacaaaatctttgcaagctcgccaagagcttggttatttgcactaatctcgcttttcaggtcagagatgtgtagccgcatggcatggttggcatttttgagctcatcgatcatgcgatgggaaatatcaagctgtcttttgagatgatcaatgtactgctgttgggcgtgttttttattcatgattttctccttggacggcttggaaattatgccaaaggtgcgtcttgatgggatcgttaggcaatatcggcatactgccataggcgatcaccgtctctgctggcacttcataaatctcaacgatggtagtgattttcttgattttcttcatgttcatgggtctgtcctaaaattttggcgtacaaagcccctacctgccaaggatggcaagcgacagataggggggtggattattggtggtttagcagtcggcggactggctcagcgatgagcttatccacggtggggaaaaagctgtctgcacgaagctcggcaagcttgtccatctcatcgagtagtacagggagcatctcatcacgctcaccacggatgacatggcggatgatgtcggcttcgatggctcgtcgtttggtgccgtattggttcaatacatgatagatgcgtaccaactcatcagcaatcagcagtagatgctcggtggtgtaggcttgcccacctgtagtgccagttagctcacgcaggcgtgcatggatggcgaatctggcactgccagaggcatgtaggggtgtgccacacagatgcaccaagtgcttgatgttcgacacatcttggctggtgatggtgttggttggcttagctaagcaagggatgttctcacctttggtcatcgtatcaaacgcacgaatgaccatcaaatgaaacttagggctaatccacatcgcataggcatagaccagttcacggcagacataagtaccttgggctttgcctttgccgatgatggtgttgtaagcgactgtgccgtcttgttcgatggcgtggatcagatcttgggtttcttgattgcgtagaaagccataaggctcgtggcgtttttcattgccactggctttgtgcaaatcatttagggaatataagccgccaatctcacggacgataaagtcggcttgggtcgggatagagatgattaagttcatggcgaactcctagttaattttttcgaaatttaacccaaaaaagggcgctagggggttcgaaaaccgtaactagtcggctgggattattcgtctgataaatcagcttatttctccgcccccctaacataatttatgatgtgagaatttgtacatcttaattttgaaagggattttgctttgatatttatgttccgcaaatttgcggagcttaaattttggcaataaaaaaccgctaaatctttcgggttgcggttatccgctagttactaaggtttcgacaccttgtgagatatcatagcccaagttttagcgaattgcaaggggttggggtgtaaaaaatccaccgcctaaagtgggggtggactttattgattggatggtggattttttggctgttgtcttagcacataaacaatcaaaatccctataatcgcagaaatggcaacaattgccaccgcagtttgcccaaagcggacggcaaaccctgcaactgtcaataaccccaaaccaagtgccaaaccaaaccattgtccacgagccatcagcgagacattttgtttatcaaaatccatcagggcggtattaacacgcaccatttctgaaatttggctggtttgtagcttatggcgttgctcttgttcggtttttgccatttgcatgacttgctcaacatattttgggtcaattttgttaagttcgtgcaaaaactcagcaggtggataaggcgagtattcctccacctgttcaaattgtgtctgcaaacctcgttcatcttgggtggcttgtactcgtgtacctttacgctgtttttggctcatagcgtaccattccaagtgagttgcctacttttttgctggcgttagatacatctgtaccaaccgcttgccaatcttgggcggtatcgcttggcttgatatcggtaggataaatgtagcgtggttctgcacttggcaataacacaaatgccgataacataccttctaaaaatggggagagtttactcatgatgcaccttgcttaattatgcggaaaacaaatgggggtatcataacgcactcggaatgagccaaaacctgctttgcctagctttggtggtacaaattccacttccttgatgatatcctgacgctgctcaatgtccaacaagtacgcttgagcagtcaaaagacgctctttttttggtatcaataccttggtttttgattttttaagcataacggtcgtccaaaataattaattgaccgcatacagcggttaattaattataacccaaattataaaattgtcaatcaagcccacttcggcaaatcaatcgccacaatctcactgctataagcagggtagctgtctgcatcacggcaagctttgagtcgtgccaatgcggtgtctaggtcggctttgccacgctctagcatctcatcagatggcgtatagctcgccaccgcataaggggcgtcacgctcagccactagccaaatataggcagggcaagtgccaaagtgtgcctcataaccatctaggtacattgccgctgacagatgatagccaaagttggtgattgtccgcttaaacgctgatggactggcgttatccgtggtcttaagatccacaatcaagccattagggaatgagtcgcagggcgtaatcaaaaagtcaggacgg

SEQ ID NO: 13 - DNA, 31940 bp, Moraxella catarrhalis
tttgtctcgcgtttgcgatgcaggcaaaatgtatagattttcaaattgtttgtctttgactaaggcttgagcaagcttggcattaccactgatcacatctacaaagtcatagacgatgcgattttcacaacccataattagatctaaattacgcaaaccgacatcaaagtcaatgatgactgttttaaagccacgcttagcaagccctgcaccaaatgatgcactggtggtggttttgccgacaccgcccttacctgaagttactacaacgatttttgccacaatggcactccttaaaataagataaagcaaacagcgatgatgcaatcaacgcacaaatttacccaaatttaacatattattagcatagcatatttaggaattttcatcaattcatgagtaattatttggataaaattatccaaaaaattggtacttatagctggtttagtagggtgaataccaatccttgtgcttcatcataagtaacttgtactgcctgatcaatcatctcgcttgggatggcatcacgcaagcaataagtacctgcaactgacaccaaagatggattaaatttttggcaaaaaatgcgtgcttctttatcacccgttgcacctgcaacaagtcgccccaaaccacgcccataaatgtgcaaactgttatccgtaatggcttctgcaccatcattgacgccaccaatgactgtcaaatcaccccctaagtgttgtaggctttgacctgaacgcaacatatgtgtatgaatgccgctcactaatgagcgatgattatcttgagcggttgatagcgtggaaccttgctgagtacttacagcagcagctgagatgggtttgtcagtgtcatagttgggtgcaggcactgtaccgctttgattgggatttgatttgtcttcggtatttggcaatcgttcaatgcgtttaccatcagcaggaaagattgccaagcgtagatctcgtgcttgattatctaaaggaccgctcaccacaccgatgggctgcacatccatcagccaaagcatatcaatgagtgcatccagctcaagatttaccgtgctatcaatcacaatcggcaagccactggcaatgggattgttgctgagtacttgcatcaaatcctttcgaatctcggttaagtcatcggtatggacttttaggcgactgaaagttagcattttaccaaataaagtgacggcttgggtcataagaatgatgccttataaaaataatgcctgaattgaaaggattggcttaatttgccattgtagcactttttaaaaaatgaaaaaagtacgccagtttcaaatgggcagttgttttttatggtgatattgttgagttttaacttgttcttcaaaataatttagcaccgcttcaataatctcggcaatgagtatctgaatctcaggacgagaggcatcaatttgggcaacaccatgggcaatcgatgacatagagtatctagtgttatatcgtcaaacaaatgacgattgacagcagtggtgacattttgcccgatttgattgccaatggtgtgaatttgtgattctatcataccatctgcaatggggatgagttttagatatttgtgtaattcaggggtgttggtgagtgctttttctacggcttgcccaatatcaatggcaagtttttcaccgtgatttgccaaaagagcggattgtaatttgggcgtcaactcgttacgcaataaggtgagtaaggcaagctcaatttgggtacgattacgctcaatggtctggtgaatgactttagcacccccagcaccatcacgagcgatttgggcacgaaaattatcaattgctgtcaaaattacccgatcagacagctcctcaagtaaaagatgataataaaatttggcagaatctacccagcgtttgggaataacctgaatacccaatcggtgtaatcttttggtaatgactgcagctcgcaaaagtcgtaacgcacgcaacgcaggaaatacgcccaaaacctcataccaatgcacaaatggaaagaaaaaccagcggtaataagttttttgataaatcgccaaactccagcgtgctaataaatccattatccaaaataatgtaaaaaatccgccaagtgcagagatatgcaagtgatgatcggtttgataggttgttacagcctgtgatatcgtcaaccaattggcaataatgagtgcaaaaccactcattaaaatattgtcaatgatcattaaaatcaaatcgatgaataataatatcaacatgacaatatcatagccaagcttaaggcggctaggtgggtggtcgctgtatttttgagtgccataaaacggaatggcatcgtttggcaagtccgcttgttgtggcgtgccaaattcttcaaaatctttggcattatttgggggtgctttcatggttttacctaatcaattgcatgggtcaataaagaggtgatgcatgtattttatccaaaccaaaaccaaaaaccaaccaaaacaagcacaacaggcttttttaatgaagtattaaaaaagcccacctttgttaaaatatattttaaccatatcttgtggtggacttttgtttatggtttaattaagactgatgaaattccgccagtctttgacttatttttttatctttggcttgccaaatttcatcaagccaagcataaagtgcatgtttgatggtttgattggtatcgtattcaccatgtttaagtgctgttaataactcatcatttgggctgataaattcaatatctaccgatagccgtgtcagtttacctgaccaaaggtcgctgtatttcggtgcgccgtctggataaaccaaagtcatatccaaaataccatcaatctcatcaccaaggctggataaagccagtgcaaaaccacccgccttaggtcttaacagatgcttatacggagaggattgcttggtgtgtttctcagcagtaaagcgtgttccttctaaataattgagtaagacaaaaggcttatttttcaaagattggcaagctcgtaatgcttcatccaaatcacggcgagccaattgagggtttttggcaatttgtgctttggtatggcgtttcatcatgggaaaatctaaaaaataaaaggcttgaccaacaactgggatataaatcagttcatgcttggcaaagaatcgggtgatgggcagccgaccttcgctgatatactgaatgatgctggtatctacccaagattggtgattacaaattagcagatatttgccattgggatttaaatttttgggtaaaaaaatacgccaatctttatgaggtaagaccttatcaatcaacaaattattggtatgaatccagcgattggcagctgtgatgatggtttgatcggctaattttgagcgagtgagtgtcttagccaagcccgccccaatgacaggtacacccaatgccaaactattggcggtaatggcacttgcgttggtgagtagtgaaagtttctgggcaagtttcggttgcttggtgtgcagttttttaaataagggcagcattttgcgagagtttatcatgagttacctacatacagtgatgcatatcatttgacagtatcgataaaagttaataagagttgattaaatttgaaaaaagcttcatgattaagaacagtttaccaaaaactgctgaaaaatgcataaaattaacaaaggtaatctatcgttgactatgcatttttgattaaaaataataaaaagtgcacatctgtgctacagttattatacaaataagtaagaaattttgctcataatatttcataatataagtaagtaatcaacttacattttgtatttagatgcagaaatattttctaatcttagaatttataataatttcacatttggttagccaaaaagcaaaaggagtttttatgaaaattaaagcattgggtgttgtgctgttggcatcaagtatggctttggcaggttgtgcaaatacaggcacaactggcaatggcacaggatttggtggtgctaatgtcaataaggcggtgattggggctgtggcaggtgcacttggcggtactgccatttcaaaagcaactggtggcgaaaaaacaggtcgtgatgccattttgggggcggcagttggtgcagcagcaggggcgtatatggagcgtcaagcaaagcagattgagcaacaaatgcaaggaacgggcgtgactgtaacccacgataccgacacgggtaatattaatctaactatgccaggtaatattacttttgctcatgatgacgatactttaaacagtgcatttttgggtcgtttaaaccagctggctaatacgatgaatcagtatcatgaaacaacgattgtcattgtaggacatacagactcaacgggtcaagcggcttataatcaagagctgtctgagcgtcgagcggattcagtgcgttattacttgattaatcaaggcgttgatccatatcgtattcagacagtggggtatggtatgcgacaaccgattgcatcgaatgcaaccgaagcaggtcgtgctcaaaatcgccgtgttgagctgatgattttagcaccgcagggtatgtaaaaatgcttggcttatctgactaagataacatagcgttaatgaatgagatacagataaccatcatacgaatatacacaatatgaatgtataaaatcttagtatcgtgagtatcgtggttgcaagttatttgggataaagccgtcaaatgtggatttggcggtttttatttttaaggtttaaaatgttatcaaaggtcggtatggcttaatttgataattaaattttaatgattatctaccaataattaaattttattgataaaaaatagttaaaataaaaaattggacaaccttatatcacaaccatatttttaaccgtatttttattttgattgactttctaatagttatgggtttcttattttcattaggttatgggctgttatcttgtgaatgggatgttgcttggctttatgatttggcatgacaattccacacgatttatttaaaatatcatttgttgttactattaaatatgttaaaatattgatgtgatggtaataaactatcacagatgcatccagcactcatagtcagcctaaagcagagttaaatttggtgatcaaaccaagttaaatgatcaaaccaagttaactgcaaagcgcaaaccaaactgtatcggagcaaatatgaaacaccaaaaactaaaagtacagccacttattttttctttgtgtttgggtctttggttgacaggatgtggtagcgataattcaacatccacgcctgcacctgttaatgaaacccagccaagcacaccaaccagcgagcctgccccagctcagcctgaaccaagtgttgaaactcaagcaacacctgagacggcagagacccaagacgcccctgaagtggcggaagtgactgagccagttgatgttactacaagtcatgcaccagtggaagctgcatctattgaggtgggtaaagctcgctatgaaaagacttgtaaagtatgtcatgatgcaggcttgcttgaagcaccaaaaatcactgacaaagctgaatggcaaaaacgcctagatgaaaaaggtttggaaacattacaggcgcactctgccaaaggatttaacaagatgccagcccaagcgattggcgatgtagcagaatctgaggtttatgcggcggttaattatatacttgagcaagccaaataaaccccattgagccaatctaaaacaagcacatggttaatgttaatcatgtgcttttatgagaatgctgacggctgaggctcttttatttgcgtatcggtgagcattttttaccccttgttggtatcataaaatcagataacaaatgatactaatgatttcattggatttagaaaaatggggagtaaatgacaccattaggataagaaaaaggctaaaagcattaaaaataaaaagggtgtcgcactgaaatggacaccctaaaataatatttggtcggaatgataggatttgaacctacgaccccttgcaccccatgcaagtgcgctaccaagctgcgctacattccgtaatcttttatattttaactgatttttgggaatttgcaagataatttataagttttttgatcttaaagtaaaatcatcaaaaaattatgccctatggcgattgtagatgtgcttatcaacataagtaccacaccaaaggattatttttgcctttggtgtggcataaaacgaaacttaagtacgatgaaattaagcttagattttaagcttaaattacgctccaatcatctgttttaacaacgcattgacctgagcggggtttgccttgccacggctggctttcatcacttgtccgaccagtccattaaaggctttttcttttccgcctttgtattcatccaccatggcttggttattggcaagtacatcgacgatgatggcttcaattgcccctgtgtcggtctcttgttttagtcctttttcggtgataatttcatcagcacttttgtcagactcccacagatgaccaaacacctctttggcgattttaccgctgatggtatcatccaaaattcgcacaatcagccctgccaaacgcttggcactgatgggtgattggtcaatggtcagctcatttttgttcagtgagcctgacagctcacccatgacccagttggctgcgattttggcattatttttaccaatgatatcaagtacttgcaagaaataatccgacagttcacgactgccatttagtacattggcatcataggcggtcaagccaaattcactcacaaatcgctctttgcgtacgcttggcagctctggcatatcggcacgcaccttggcaagtgtctcatctgatatgatgacaggcaacaggtcagggtctggaaagtagcggtaatcattggcttcttctttggtacgcatggcacgagtttcatcacgctcagggtcatataggcgtgtggcttgcacgacttttccgccgtcttcgatgacatcaatttggcgttcaatttcggatttaatggcacgatgaataaagcgaaatgagtttaggtttttaagctcacagcgagtaccaaagggcgtgtttggcttgtgtaccgacacattaatgtccgcacggaacgagccttctgccatgatggcatcactgatacccagccatgtaaccagttcgtgaatggtcttgacataagcaaccgcctcatcaaccgaacgcatgtcaggttcagagacaatctcaatgagcggcgtacctgcacggttcaaatccacgcccgtcatctgtggcacagcgtcatgcaccgatttgccagcgtcttcttctaggtgagcccgtgtgataccaatgcgtttggtgtattcatccttttgccctgcattgacaaggatgtcaatatagccctcgccaacaatggggtttgccatttgcgtgatttgatagcctttgggtaggtcggggtagaagtagtttttgcggtcaaaggtgttgtaagtgccaagctcggcattgacacccatgccaaattttaaggcacgttcaatcacgcctgcatttaagacaggcaacgcccctggaaagcccaaatccacaatggtggcttgggtgtttggctcttgtccaaaggcggtgggggcgtttgaaaagattttgctgtcagtgtttaattggcaatggatttcaataccaatcacaacttcatagccgtcaattaggggggcttgttgggtcataaattttcctattcactataaaaatttaatggattataaaaatggataaatttctttaccaatttgtgccattatttcatctttttgatttttaaaaccaagggatttaccatcatggggctgggtgataaataggctgataaaataaggtttattattttcattccaaatcacagcaatgatattttttgattcactacctgtgcctgttttgtcgccaattcgccaattttttggtaaatattttctcaataaattatcagcaactttatcgttgataagccaagttatcaactgttctttgctttgattggataggatattgcctacaatcagtgcttttaggctttttgtgtaaggaattggttttgcggtatcactggtttcaccataatgtgagcgatttaataaaggttcattatttgccagcaccatatccgccccaatctctttcaaaaattgattgaatgcagtcaaacccccaattttatccaacaagatattagcagaaccattatcactcagtgttatggtagcttcgcacaattcactaatagaaattggtttattctcatcaaagtattttttacagacaggagaatattctatcaaatcgctttctttaatgatgattttttcgtttaaatccaatttttctttatctacaagtaataatatatgacttgcaataaaggctttaatggtactattaacaggaaaatattcattaccacgatgactggatagttcaccattgtcagcaataatcgtcataccaattttggcattaaatttattttcccaaattggcaatatctcttttaatttattttgtaataaatttggattgtttgttatcttgtcatcgggcaaataatcatcagacaaattcgttttacatccagttaataaattgccagaaaaaataataggtagtgccaataaggttttttgtaaaaaatgacggcgttgcatcattatccccttttattgtttgggataaatttatcatttatcccaagttcaaaatcacttcactaaatccgccatctcttgatgaaactcggtattcgcctgataaatatgagcggtttttaatagctcgctttccgcccaatgcttaccaatcaactgcaatcccacaggcaagccgttcgcttgtcccacagggtgcgatagggcgggcagacctgccaagtttacgccgatggtgtagacatcaccaaggtaaatgctggcagggtcaaggctttcacccaatttataggcagccgttggagcggtaggacttgcgatgatgtcgcatttttcaaatgcctttttaaaatcatccacgataagacggcgtaccttttgggctttggtgtaataagcgtcaaaatagcctgccgagagagcataagtacccatgatgatgcggcgttgtacttcttcgccaaagccatcagagcggctgcgagtgtataagtcgtgtaagtctttgggattttcatagcgataaccaaaacgcacgccgtcatagcgagataggtttgagctggcctcagcgggggcgagcagataataagtggcaagtgtgatggcagggtcggtaatgtccacttctacgatttttgcccccagcgcttcatatgtggctagggcagcacgaatggatttttctacttcatcatcaagccctgccccaaaatacgcctgtgctatgccgatttttttgcctgccaaaggtttgccgtctgtggctgttgccaaaatgtccgccacataatcctcactggggcgactgatggatgtggcgtctttggggtcatatcctgtcatcggggcgagcaggtaggcacagtctagggcggatttgccaaaagcgcccgcctgatcaaggcttgaagcataagcaatcatgccatagcgagacacacgcccataagtgggcttgatgcctgtgatgccacaaaaactggcaggctggcgaatagaaccgcctgtatctgagcctgtcgccacaggcacaaaccctgccgccaccgctgccgctgaaccccctgacgacccacctggcacacgagtggtatcccaagggttatgcactgccccaaagtatgaactttcattgtccgaacccatggcaaattcgtccatgttaagtttgccaagactcacaaagccactgtttgcgatgttgtcaacgaccgttgcatgatagggcgagacgaagttgtagagcatttttgagccagcagtggtcaaaacccctttggtacataggttgtctttatgagccattggtacgcccaaaagtggacggttgtcgccttttgcacgcagtttatcggcaagttcggcttgggctagggcattgtcaaaatctttggtgatgaagctgttgatttgaccatctaagcggttaatgcgattggcaaaatgctctaccagttcatggctgctaaattgtttgttttttagaccgtctgctaattcatggacggataggtggtgtaaatctgtcataaaatgccttttttatgttgaattttgttttatttaaatgttaaatccagatggggtctaaaaacatactgccattttttagaccatgccttgttattcaatcacctgtggcaccaaatataacccatcttgcaccataggggcaaccgcttgaaaaccgtctcggtcaatgtcagaattggcaatgtcggcacgcagctcattacaagcttcgtggatatttgccaaaggcttgatattatcagtgtttacgccatctaatatgtccatcatggctaggattttatccaaattgcctgcatagttttgggcggttttttcatcaagagcaaggcgtgataaatttgcacagtccaaaatgtcttcggtggtgatggtcatgaatgctcctaaaaatcatacaaatttgtttaaattgatcagtaagcagataagtcatgcttttatggattggttgtgatctcacgccatcgcatgccacgaaaagccaatcgcactaaactgaatttgatttgtcttataaatttaacgacataaagcctaataaaatggttaattgtaccatagcttgaaacaggcacaaaacaaacttttaaatctgagcggtttttacttataaatatttatcagtgagccatttgaccaagctggtcaaaaagcggataatgcgtttgttgtctactatcttaaaccgattatgaatgatataaaaactttgccgattgtgttggcatccacatcaccaagacgccaagagctgcttttggctgcaggcgtgaaatttgttgtaaacgcagttgagattgatgagtcttggcaagccaaagaggcaccaacagactatattaatcgcatggtgctgaccaaggcacagcaagcagccctgaacagccatttgccagataagtgccttttgatcaccgcagacaccattggcgtgattgatgatttggtactgaccaagcccaaagatcaggcggatgcatatcgtatgtggcagatgctttcagatacatcacatgagatttggacggcagtgtgtattagcgtgattgatgcaagtcaaattgttgaccaagcagtcatttgtgagtgtaccaaagtaacttttgttaaaatcacccaagcgatgatggcaacttattgggcaagcggcgaaccacaggataaggcagttgcttacgccattcagggcggtgcgatggcttgggtgctatcgattgatggcagttataccaatgttgttggattgccattagcacagacattggctttgattgataaaatggctttacaaacagtcaattagccccattttgttcattgattgtattgaccaatgcatttatatatgacgatgtttaaattgcatagactgatatcagatttatgaaatcaataaacccatctaggggcataaacttgcacattaagaaaatatcacttaccataagtatcagataaagattaccaagttataaataaagagtaaataatgtcagaagaattattaattaattatacacccatggagtcacgcatggcggtgctgaccgatggcgttaccagtgaaattttgattgaacgccaccaaaaattgggtttggttggcaatatttatttgggtactgtggcgcgagttttgccgggtatgcaggcagcgtttgtggatattggacaagccagaactgcatttttacatgccaatgatatgcaaaaacccaagcgtagtagcgacagcttagacgaagcaccaccagcaccgattacacagcttcgcatcgcacatcaaagtaacgcttctcaagatgagcgtgctgagcaaaatgggtatagctcagccatcgatatccaaagacctgctttacccaaaaaacctgagtcaccaaacgctgaattaattcaatatcgcctaagagaaggcgataaaattttggtgcaagtcgtcaaagatgaacttggtacaaaaggtgctcgcctgacgacgaacatctctttaccatctcgttatttggtgtatttacctacaaatgatgagtatgttggggtatcgatacgcatcgaagaaactgaagagcggtcacgattaaaagaaattctgacgcaacttatgcaaaacgccaacttaaaaggcggactgattgcacgcactgccgctgaggagatgagtgagtctaagcttaaagaggacatttattatttattacaactttggcaaaccatcatcgcacgccaagcagcgacacggttacattccaataaacgcagtgagttgatttaccaagagctatcactgccgctttgatgtatccgtgatttggttaatgaaaaaacaaccaaagtgctgattgataatgagatgatgtatcatgaggtagcacattttgcccaagagtttgtacctttcattgcaccgatggtgacgcattatgcaggcgagactcctttatttgatttatatcgtgtcgaagaagatctgcaaaatgccctaaaacgccgtgttgagcttaaatcaggtggctatttaatcattgaccaaaccgaagcgatgacaaccattgatgtcaatacaggttcttatgttggcgcacgctgtttggaggatacggtttataaaaccaacctagaggcaacacatgccatcgctcgccaaattcgtctgcgaaaccttggtggtatcattattcttgactttatcgatatgtccgaagaggtgcacagagccgatgtactagcaagcttacaagagcagctcacccatgactatgccaaaacgaatatcactcaagtcagcgagcttggtttggtagagatgacacgcaagcgtaccagagaatcactgccacaacagctgtgtgagccttgtcctgtctgtgatggcaaaggctatattaagactgcagaaacggtatgctttgagatatttcgtgaaatcatgcgctatggacgcacctttaataagcctaaacaatttaccgtcatcgctcattcaagcgtgattgatatgatgctatctagcgaagctggtacagtggcagacttagaatatttgattggcaaacccattcgttttgagattgaaaactttttcacgcccgagcagtacaacattgcacttgattaacattcactgttgattttcttgatgaatttttggttattgaagaccagtttatcggtcaaatttaagaaaaattagcaaaaagtctcatatataccttgcattgataaatttttcgtgtataatagacaaatcatttgaactgcgttgcactttttgcaaagaatgtgaaaagtttacttcaacaatgaaccttgttcaactcaaaggaagtactaagcaacgccacagccaaagcatcgtttttggcactattgaacaaacacccctgctaccttgcttttgacatacggttggcagggataagattattttgctttttataattcgaaagtaaattttaacggtttaactttcattcattgatgaaagtttaaaagcacttaattaggagcttgttggcatggctaaccagagaatccgtatccgactaaaatcgttcgaccatcgtctgattgaccagtcggcacaagagattgtcgatactgcaaagcgtacaggcgcacaagtttgcggtcctgtaccgttgccgactcgtattgagcggttcaacgtattgacatcaccacacgtcaacaaagacgctcgtgaccagtacgaaattcgcacccataagcgtatgattgacatcgtgcaaccaacagataagactgttgatgcattgatgaagctggatctagcagctggtgttgatgttcagatcgctttgggctaatgaacataagtctggtttgaactattaaactattaatataaagaggtctaaaatggtgattggtttagtcggtaaaaaatgcggcatgacccgagtcttcactgaagcaggcgtttctattcctgtcacagtggttgaggttgatgccaaccgcatctcgcaaatcaaaacagtagacaccgatggctataacgcaatccaaatcaccacaggtgagcgtcgtgacagccgtgtgactgctgctcaaaaaggacacttcgcaaaagctggcgttgctgctggtcgtggtgtttgggaattccgtgcagaagaaagcgatttagaaggtcgtgaaatcggcggtaatatcctagctgatatctttgaagttggtcagttggtcgatgtgactggtcaaagcaagggtaaaggtttccaaggtggtgtgaagcgtcataacttccgcactcaagatgcaacccacggtaactctgtttctcaccgtgttttgggttctacaggtcaaaaccaaaccccaggtcgtgtatttaaaggcaaaaaaatgccaggtcaaatgggtaataaacgagttactgttcaaggcttggaaatcgtttctgttgacgccgaaaaaggtgtactggtcatcaaaggtgctgttccaggtgctaatggtggcgatgttatcgtacgcccatcagtcaaagcctagtaaaggggattaacgtgaatttaaaaactgttacaggtgcagcggttgaactatcagagatcacttttggtcgtgagtttaacgaagccttggtacaccaagtcgtaactgcttacctagctggtgctcgtcaaggtactcgtgctcaaaaaactcgtggcgaagtttctggtggtggtaaaaaaccatggcgtcaaaaaggtactggtcgtgctcgtgcaggctctatccgtagccctatttgggttggtggtggtcgtgcatttgctgccaaaccacaagattggtctcaaaaagtaaaccgcaaaatgtatcgtggtgcaatgcagtgcattttggcggaattggttcgtcaagagcgtttggttttggttgatgacatcgctgtatcagcaccaaaaaccaaagagcttatcgctaagctggctgaactgaatgccccacgcgcattgatcgtaactcatgaagttgacgaaaacttgtacttggctgcacgcaatatcccatatgtgaatgtattgggtactcgtgaagttgatccagtaagcttggtttcttttgacaaagtgattatgactgttgaagcagccaaacaatttgaggagacacttgcatgagcaacgcaagactatatcaggtactaaaagcacctgtattttcagaaaaatctcagcgtctgggcgacactcttggtgtgcaagttttcaaagttgatagcactgcaaccaagcgcgaaatcaaacaagctgttgagctgatgtttgaaggtgttgaagttgtcaaagtaaacacacttaataccaaaggcaaaaccaagcgttttggccgtgttgttggtaagcgttctgacgtgaaaaaagcgtatgtaaccttaaaagctggttcagacgtacaaatcggtgctggtgaagaagccactggcgaaacagcgactaacgaataaggaataaaaaatgcctatcgtaaaagcaaaaccaacctcaccaggtcgccgctttgttgaaaaagttgtgcatccacacctttataaaggtcgtccttatgcaccacttgttgaatcaaaagctaaaactggtggccgtaacaataatggccgtatcaccacccgccatatcggtggtggtcataagcagcattatcgcttaattgattttaaacgcaataaagatggtattccagctgttgttgagcgtattgaatatgatcctaaccgtacagcacatattgctcttttgaagtatgcagatggtgagcgtcgttacattattgcacctaagaaattaagtgttggcgatcaggttcaatctggagaaggttctcctatccgtccaggcaactgcttaccattgaaaaatatccctgtcggtacagtaattcataatattgaacttaaaattggcaaaggcgctcaaattgctcgctctgctggtgcagcagttcagttattgggtcgtgatggtgcttatgtcatcgtgcgtttgcgttcaggtgagactcgccgtattcatgctaattgccgtgcggttattggtgaagtgtctaacactgaaaataacctaaaatcactaggtaaagcaggtgcagcacgctggcgtggtgttcgtcctaccgttcgtggtacagcaatgaacccaattgaccacccacacggtggtggtgagggtcgcaacttcggtaaacacccaaccagcccatggggtcagaaagctaagggtcttaagactcgttctaacaagcgtactgacagtatgattatccgtcgccgtcgtgccaagaaataaaggaaaagtttcatgcctcgttcattgaaaaaaggtccatttatcgatgcgcatttgtttgctaaggttgaaaatgctctagaaagcaacagccgcaaaccgatcaaaacttggtcacgccgctcgatgattctacctcaaatggtaggtctaaccatctcagttcataatggtcgcactcatgtgccagttattgtaagtgaacagatggttggtcataaactcggtgaattcgccccgacccgttcttatcgtggtcatggcgttgataagaaatctaaaagataaggtgctaccatggaagtaactgcaaaattacgtggtgccgccatttcggcacagaaagtaagattggttgcggacgaagttcgtggtaagccaattgagcgcgctttggacattctaacatttagcaacaaaaaaggtgctaaactggttaaaaaatgcctagattcagccattgctaatgctgaacacaataatggcttggacattgataagttgcgtgtcactaccatttatgttgatgaaggtattaccttaaagcgtatcatgccccgtgccaagggtcgtgctgatcgtatcagtaaacgcacttgtcacatcactgttaaagtaggggaataatcatgggtcaaaaagtacatccaattggtattcgtttgggcgttatcaaaaagcacaacgctaactggtatgccaatcctaagcaatattcagagtatttgctgaatgacttccaagttcgtaattttttgcgtaaaaaattggaaggtgcaatggttagccatatttacattgagcgtccaactggtgctgcaaaaatcacgattcatagtgcacgccctggtattatcattggtaaaaaaggtgaagatatcgaaagcctacaaaaagagctaaccaaactgatgggtgttccagctcaggttaatatccaagaaatttctcaacctgatttggatgctcgtttggttgccgaaggtattgccagccagcttgaacgccgtgttatgtttcgccgtgcgatgaagcgtgctgttcaaaatagtatgcgttcaggtgctcaaggtattaaagttgagctttctggtcgtttaggtggtgctgagattgctcgtaccgaatggtatcgtgaaggtcgtgtgccgctacacacattgcgtgctgatattgattatgcatcagtgcgtgcagaaactacttacggtactatcggtgttaaagtttggattttccgtagtgaagttttagacggtatgaatagtgcctacaacccagttgttgaagataaaacacgcgcaccaaaacgccgtggtcgttctaatcgccgcaacacagacagaggttaagctatgttacaaccaaaacgtaccaagtttcgcaaaatgcacaaagggcgtaacacaggtcttgcccagcgtggtaatacagttgcttttggtgaaattggtctaaaatctatcggtcgtggtcgtatgactgcgcgtcaaattgaggctgcgcgtcgtacaatcactcgtcgcattaagcgtggcggtaaaatttggattcgtgtattcccagataaaccaattaccgaaaaaccattagaagttcgtatgggtaaaggtaaagggcctgttgagtattgggtagcggaaatcaaaccaggtaaaatgctttatgaaatccaaggtgttagtgaagaccttgctcgtgaagcactgactttggcagccgccaagctaccatttaagactaccattgttaaacggacgataatgtaatgaaaaccaacgaattacgcgaaaaatcagtagatgagttggctcaattgcttgatgaaaagcaacttgatgcgttccgtctgcgtatggctaaggccacaggtcagcttgccaatactcatgaaatcaaaaacaatcgtcgtacgattgctaagattttgactttgattaatgaaaaacaaagaggtgaggcatgagcgataacacccaaacccaagaagttggcgttgtaactggtaaagttatcagcaataagatggataaatctatcgttgtgttggtcgaacgccaaatccgtcacccaatgtatggtaaacaagttcgtcgttctaccaaaattaaggcacatgatgaaaataatatttgccaagaaggtgatatcgtacgcatcaaagaaactcgtccattctccaagactaagacttgggctttggtggatgtagttgaaactgctgtaaaaatttaagacatttgcattaaaagtcatttgagagtataatatatatcttttagatatgtatccacttttagtggcaaatgacttttattgctttattattattggagtaatgcgatgattcagactgaaacaatgctggaagttgcagataacagtggtgcaagacgcgttcagtgcattaaagtactgggtggctcacatcgtcgttatgcatctgttggcgacatcatcaaagtaacagtgaaagaagcaattccgcgtggccgtgttaaaaaaggcgatgtgatgaatgcagtggttgtgcgtaccaaaaaaggcgttcgccgcccagacggttcagtgcttcgttttgacgacaatgcagcagtattgttgaataataacaaagcaccgattgcaacgcgtatttttggacctgttactcgtgaactgcgcagtgaacaattcatgaaaattgtttcattggcaccagaagtactgtaattgtttagaggcttattatggcaaagttacgtaaaggcgacaccgtggttgtgattgctggcaaagataaaggcaagcaaggcacaattttggcggtgaaagcagaccgtgtaaaagttgaaggcattaacattgtaaccaaacaccaaaaacctaaccaaatgctaggcaaggaaggtggtatcgttaagcaagaagcttttttacatatttcaaatgttgcgatttataacgcaaacacccaaaaagcagatcgtattgcttatcaagtgaatgaagatggcaaaaaagagcgtatctatcgttcaactggtgaagtagtggcgactgcataaaaaactaagggtatatagtaatggcaagattaaaatcgttatataatgacaagctaaaacagcaaatcaaagaagagctgggtttagaaaatgtcatgcaagtaccaaaaatcaccaaaatcactttaaatatgggtgttggtggtgcagcacaagataaaaaattacttgaaggtgctttggcagatatgaccgcaatcgctggtcaaaaacctgttgtaaccaaagcacgcaaatcagttgcaggctttaaaatccgtgaagagtggccaatcggctgtaaagtcaccttgcgtggcgagcaaatgtatgaattcttagatcgcttggttgccatcgcaatcccgcgtatccgtgacttccgtggtttttctgccaaagcatttgatggtcgtggtaactattcattgggcatcaaagagcagatcgttttccctgaagtagactttgataaaatcgatcgtatccgtggattggacgtgaccatcacgacaaccgcagcaaatgatgatcaaggtcgtgcattgctaaaagcatttggcttcccattcagataaggtaaaacgttatggctaaaaaaagcatgattaatcgcgaattaaaacgcgaaaaaactgttgctaagtatgctgaaaagcgtgctcagctaaaagctatcattagcgataccaatgctagcgaagaagagcgcttagatgcaatgttggcattgcaagcgttaccacgtaacgcatctccggtgcgtttgcgtaaccgttgtggcgtaactggtcgtccccatggttatttccgtaaatttggtctttcacgcaatatgttgcgtttacatgtaatgcaaggcgatgtgcctggcgttcgtaaagctagctggtaataaggagttacgctatgagtatgcaagatccagttgccgacatgctaactcgcattcgcaacgcacaagcaagaaataaaccatctgtacagatgcctgcttctaaactacgcaaatccattgctgatttattggtagctgaaggctatttgacttctgctgaagtcagtgaagctgaaaatggtaaaaaggtattagatattgaattaaaatactaccaaggcaaaggcgttattgagcaattgaagcgttatagtcgcccaggtttacgccaatatcgtggtaaagatgaacttccaagcgttcaaaaaggtcttggcgttgccattatctcaaccagtcgtggcattatgagtgatcgtgcggcacgcgaagctggtattggtggtgaaatcatcgcattggttgcataattaattacatgtaattactgataaaaatctagaatatttagtttacagctaagtatagatatgttaaactagcaggctttaatgcctgttagttttttatggctatcatttatctgatggtagtttagttttcatttaaaggaaattcctatgtctcgtgtggctaaagccccagtaacgctaccagaaggtaccaacgttactttgaacgatcggcaggttgaagtcaaaggtaagaatggcactttatctttgagcctgcatgaattggtcgagctaaaacaagaagatggtattgttgtactatctccagttgtagacactaaagaagcgtggatgcacactggtacagtgcgtgctctattgaacaatatggttaaaggcgttagtgaaggttttgagcgtcgtctgcaactgattggtgttggttatcgtgcacaagttgcaggtaataaagtaaacctaagtttaggtttttctcatccgatcgaatacacgctacctgaaggtgttacggctgaaagcccaagccaaactgaaattttgcttaaatcaagcgataagcaaaagcttggtcaagcagctgctaaaattcgtagcttccgcccaccagagccttataaaggtaagggtgttcgttatagcgatgaagttgttcttcgtaaagaagctaagaaaaaataaggtgagccataatgttcgataaaaaatcagctcgtcttcgtcgagcgaaaaaaactcgtgcacatatccgtcatttgggtgttgaccgtttgacagtaacccgcacgcctcgtcatatttacgcacaaatcatctcaccaacgggtggtgtggttgttgctcaagcatctactttagatgcaactttgcgttcaggtgcaacaggtaatgtggaagcagctaaagctgttggtgctcttattgcagagcgtgcaaaagctgctggtatcactaaagttgcatttgatcgtagtggttttaaatatcatggccgtgttaaagcactagctgacgctgctcgtgaaaacggattggagttctaatcatggcaaaagttgaacaaactgacggtttggtagaaaaattagttgccgttgaccgtgtagcaaaagttgtaaaaggtggtcgaattttttctttcaccgcattaactgttgttggtgatggtaacggtcgtgttggttttggtcgtggtaaggctcgtgaagtgcctgcagccatccaaaaagccctagaagctgctaagcgtaatatgattacggtggatttagctggtcatacactacagcacccaatcaatgctcgtcacggtgcatcaaaagtttatatgcaaccagcctctgaaggtactggtgttattgctggtggtgcaatgcgtgctgtactcgaagttgcaggtgtacagaatgtattggcaaaatgctatggttctaccaatgcagccaatgttgtacaagcaactttcaaaggtttgcgtgacatgacatcgccagagcaagttgccgcaaagcgtggcaaatctgtcgaagaaattttgggctaagaaataggtgagttacgatgaaaaaaatgaaagttactcaagtaaagtcgagtgcccatcgtttggcaagtcataaagcttgtttgaaaggtttgggactacgtcgcattggtcatactgttgaagttgaggatactccatcaactcgtggtatggtaaatcgtgtacattacatggttaaagtggaggaagcgtaatgggtcttaaactgaatgaactatcaccagcattgggtgctaagaaaaaagcattccgtcgtggtcgtggtattggctcaggcttaggtaaaactggtggtcgtggtgttaagggtcaaacttcgcgttctggctcaagcattcctgcgggttttgaaggcggtcaaatgcctatctatcgtcgtttaccaaaatttggttttacttcgaagatggctatgacaactgctgaagttcgtctatctgagcttaataagattgatggcgatactgtgagcttagatacccttaaagctgcgaatattattcgtggtgatatgaagcgtgcacgcattattttatctggtgaggtgggccgtgcattgacttttaaaggtgtaaaagttacaaaaggtgcaaaacaagcaatcgaagctgccggtggtagtgtcgaggagtaatctatgtcaaggcagtcagtatctcgttctagcattcccttaaatccttttactttcgtaagaaagtatgatgaattatggacgcgtatgctttttttatttggggcgctgattgtttatcgacttggttctcatattccagttccaggcatgaaccctgttagcttagctaattttttccagagtaatagcaatacctttttgggtatgtttaatgtgttttctggagggtcattagagcgtatgtctattatggcactaggcattatgccttatatttctgcttcgattgttgtgcagatgatgtctgccatcataccttctcttgaagcgttaaaaaaagaaggtgaatctggacgcagaacgctgaataaatatacgcgccaaggaactttagcacttgcatttgttcaggcagttggtatgtctactggtttgattgctggtggcttgacattgacaactggtttgagtttttatattccggcagtgacttctttagtcgcaggatcgatgtttttaatgtggcttggtgagcaaattactgagcgaggtgtgggcaatggtatttctatgcttattttagcgagtatcatagccagtgcgccaggcatgatttcacaggctttcagtcaaaatttaaatttgattgttatgcttttatttgtcgtattgggtattacagtgatagcggccattgtttttattgagcgtgcacagcgccgtgtacctgtgaactatgctcaaaaacagcaattaggtcgtaaaatttatgcacagcagcagtcacatttacccttaaaaatcaatatggctggtgtaattccagcaatttttgcaagctcgctattgctacttccagccagcttaggtcaatggactacagttagtgaaaatccaacgctgacccaagagattattcaaaatatcactttagtacttcagcctggacaacctttatacttattgttatttggtgtgatgattatatttttctgttatttttatacggcattaatgtttaatcctaaagaggttgcagaaaatttgaagcgaagtggtgcttatattccaggaatacgaccaggtcagcaaactaagcgatatttagattttgttttaaatcgcctaacttttatcggtgcaatgtatatgacaatcatctgtttgatgccgatgattatacagtctgtatttaatgtaccaattccactaggtggggcatctttattgattatggttgttgttttgatggactttatcgctcaattacaagcacatttaatgacacatcaataccatgatcagacgattattaaatcgtcataatgatacgcttctttagaagcatattaaaattaaaaatctgtggcagttgtgacttcatgtatcgcaaagataaagtacttgttatttacaatgcagagctatgccacaaacaatgtcaaggttaatttacaaattaatacttgatttattatagcggataatgtattatccgcttcttgctatgctatcatttatgagatagcagttaaacttagcaaatacaactgtatttgtgctaatggagagaaatcaatggctcgtattgccggtgtaaatattccggacaacaaacatgctgtgatttcgctaacttacatttttggtattggtcgtacaactgctaagcaaatccttgctgctgttggtatcgaagaaaccactaaaattggttcgttagatgattcacaactggatgctgttcgtgcagaagttgcaaactacacagtagaaggtgatcttcgtcgtgaagtttcaatgaatatcaaacgtttggtcgatcttggttgctatcgcggtcttcgtcatcgtcgtggtctaccagttaatggtcagcgtactaaaacaaatgcgcgtacccgtaaaggtccacgcaaagcaattaaaaagtaactaacttaggaagctaaaagatggcaaaagacactcgtagccgcaaaaaagtggctcgtcgttcggtatctgaaggtatcgcccatattcatgcgtcttttaataacaccattgtaacgattactgatcgtcaaggtaatgcattggcttgggccacttctggtggacaaggcttccgcggttcacgcaaatctacaccatttgcagctcaggttgcagctgaggttgctggtaaaacagcacaagaaacctatggtgttaagaatgttgatgtcttggtaaaaggtccaggaccaggtcgtgagtctgcggttcgtgcactgggtgcattgggttataaaattaatagcataagcgatgtaacaccaattccacacaacggttgccgcccacccaagaagcgccgcgtttaaggagatagacttatggctcgttatattggtccaaaattaaaattgtctcgccgtgaaggtactgacctgcaattaaaatcaggtgtaaagccttacgatgttaagacaaaaaaagcaggtcgtgtacctggtcagcatggtaatagccaaaataaaacctctgaatacgcatcacaacttcgtgaaaaacaaaaagttaaacgcatgtatggtgtattagagcgtcagttttctaactattataaagaagcagcacgtgagcgtggtgcaactggtgaaaacttgttggttacccttgaacgccgccttgataatgttgtttatcgcatgggctttggtgcaacgcgtgcagaagcgcgtcaattggttagccatcgtgctatcatgctaaaaaaagctggtcgtgatgagtttgtacgcgttaacattccttcaattcaagttcaagatggtgatgtgatcgcagtgcatgaaaaatcaaaagagcaacttcgtattaaaaacgcagttgagcttgcgacacagcgtggcatcccagcatggttagaagttgatcacagtaaactacaaggtactttcaaatctgcgccagagcgtagtgaattaccagctgaaatcaatgaaaacttaattgttgagctatattctaaataatccgaattaaatcgaggtgacactatgacaaatgcaactgagtttctaacaccgagtgcgattaatgtcgatacggtcaatgaaacgactgcaaaggtcacgctcgagccgttagagcgcggttttgggcatacgctaggtaatgctctacgccgtattctactttcttcgttatcaggtgctgcagtagtagaagctgagattgaaggtgttgatcatgaatattcaacactagaagggttgcaagaagatgtactcgatcttcttttaaatctgaaatctttggcgattattctgcatgaccagaatgaagcatatttgactttggataaacggggtgcaggagttgtgactgctgctgatcttgagctaccacacaatgttgaaatcgctaatcctgatttggtgcttggcacattgagtgagcgtggccatctgaagatgcgactacatgtagtaacaggtcgtggctatgagcctgccaatcagcgtcgtgaagatgccaattctaaaattattggtcgcttaaagcttgacgcaagctttagcccaattattagagtggcttatgatgttgaaaatgctcgtgttgaacagcgtaccgatcttgataaactgattatcgagcttgagaccaacggcacgattgacccagaagaagctattcgcaaagctgcaacgattctacaacaacaaattgctatttttgtggatcttgaagctgaagaagcgcctgagcctatcaaagaaaaagaagagattgatcctgtgctgttacgcccagtggatgatcttgagttaacggttcgttcggcaaattgcttgaaagctgaaaatatttattacatcggtgatttggtacagcgttcagaaactgaactattgaagacaccaaatcttggtaagaaatcattgactgagattaaagatgtgcttgcatctaaaaatcttgaacttggtatgcgtttagataactggccgccaagtgatttgcgtgtcgatgatcgtttttcttatcgtagccgctaatttaaaggatacttgaccatgcgacatcgtaaaagcggagtcaagctgggtcgcaccagcagccatcgtaaggctatgttccaaaacatgactaattcattgtttgagcatgagctaattaaaaccactttgccaaaagcaaaagagcttcgccgtgtggcagagcctttgattactttggcaaaagaagatagcgttgcaaaccgccgtcttgctttcagccgtatgcgtaataaggatatggttggtaaattattcagtgagcttggccctcgttaccaaactcgtccaggtggatatttgcgtatcatcaagtgcggttttcgtgatggcgataatgcaccaatggcttatgttgaattggtagatcgtccataatggattttactgcttcattaaaaaccctgattatttatcagggttttatttttaatgcaatattgttcttaatttctatcataatatcagcttgcatctattaacgagacaactggtgatggttggtcttgtaattcacctgcgtccaaaaatccgtcgaccaaattttccatcatagcttcaagctcataggtgctatcgtatgttactttttctccattaagataaattggcatgctaataaatggtgcatttagtgcttcaattaagctcagtacgattggtgtgtgggcaaggctggcacaaatatttttgtcgctagaatttacaaatttctttggagctgatttggttgggtttaataaaaaatgagtgtttttattgagagtattttttaaatttcgatgggcaaaatcgctaattttagcaaaggttgatatttcactgatatggcgacacattaaacaaaatttaggctcgtattgaccaaagcgtaatgcttgggcaagtgattgtttggcatcaagactgacggctaagcgatatccgcttgggtctggataaataattaattggtcatttttgagtaaattggcagcttgtattaacacacgcttttggggattgtcaggatgaatataaaatttttgcatttgtttacctcatcttaattgttgtgtagtagtttgaatggctgagtgttaagataacccataataaaagttgcgcgtctgtgggcagggtgcttgggtttgatagataaaatttagcttggttaaagacatcttgggcaaaggtgctgtttgagatatcaaaatttgcatttaggttgtcttgtgagacataaaaatatcgaccgcaagctaaagttaataaagcttcaatggcttgtggcttgatttcaacttgctcaaataaccgctgagtttgttcatttctaccatcggattcataccagtaaccaaagtcattgagcttgcgacgagcttgtcctgcgatgcaccagtggctaatttcatgtaatgcactttgaaaaaaaccatgtgcaaattcaatgcgtgcaggtgcattatgctcactgggaaaatattcaggttcgctttcaccacgcaccagcacggtcggaatttggtcaaaatacatatgattaaatagcaaatcaaataagtgaattaaccagtcagtcagtatttgctcatcttgtgcctcatcttttgtattattttggatgagctgccagcgatgataaaaattttgccatggcggcggtgaaattttctccaagatgatttgaagtttagcaatgggtctttgatgaaattgctgccatagtgtctgaatgtatttggcatactggatggtgcttgcctgttggcatttattcacatctggtgaaagatgattgaagtttatcataattgaagcttttaaagtaaattggctttggctgattgattttgagatattataatgtattttggcaaattgccatactaagatgctgaaattaaaaaccccttttaaccacgatgaacttatgccataataatgggcaaattgcacacatagctttataatatgatgacaaaaactgtaaatcaccaccccaaacaacaaagcttgcccgccaatattatgcttgataaatgggcagatattggatttaaatggcagggcagtttatcaagtaccgagcttaaacgcttgagtgagcaaacggtcgctgatagtgtgctagacttaacatttgtactaactaaacaagaaggcattgtttggctaaactatcaagtatcaggagaggtttttgtgacttgtcaaagatgcttggagtctttaggtatcgatgtttcaggagaatatcgcttggcagttttgtcatcggatggtgatattgggcgtattaatgatgctgaatatattttggttgatgagcttgcaacaaaaacagcaaagctgcccattaaggacttgctagaagatgagctgttattaactttgcctttatcgccaaagcatcaagactgtgatatgccagttcaaatgcttaatgaagaaaaatatgaggaagagcaagaaaatccttttgcttcattagctcagcttaaaggaaaattatcttaaaaattgcccaaatgactttaaaagttatcacaaaagtagctttttattaaaaaacttgtaaatttatgcgattaggctttgaaatttacaagttttttgcgtataatacagcgtttattgtgcataggtctatgatggacagcgattgatgctaaatcgcattgacacaaattgacaaagacgcacgaaccgtttttctttagggcaaacttgcctgactgattattaggagctatcatggcagttcaacaaaaccgcaagagccgctcacgccgtgacatgcgtcgttcacacgaccatatcgctatcgctgagctaagcatcgattcaaccactggcgaaaaacaccttcgccatcatgcgaccaaagatggtttttatcgtggtcgtcagctatttaaagtaagtcaagatagctaagtgctatttttatagtcataaaaccaagccaatatgaacgggcttggtttttttgttattgtcatgatattattgacaaaatgccatttaaaacaaagcacattcatactatctaaaattttttgtgatttgagatagttttgggtaaacaaatgtttatttttatggtagaattggcaaactttcttgtaccaaattaaatgggtgcttaagaattggtaatatggtttatacggtatttttatcgtcaatgtacaaacaggtgaattatgacagaagccaacagcggtatgacaaagcgtttggcggtagtttttcccggtcaagggtctcaatctgtcggtatgatggatgagcttgataaagcattcaaaagtgtgcgtacgacatttgatgaagcaagtgaagctttgggctttgatttatggtcagtcacacaggatgaaaactgtttgaataagactcaatatacgcagcctgctttattaacttcaagtatcgcaatttggcaaattattgagccaatcttatcagcccaatccattaagccgatgtatcttgctggacattcgctaggggaatatagtgctttggtcgcagcaggtgtgctcaaccttaaagatgcagtgaagttggtgcatgagcgtggtaaatttatgacagaagctgtacagggtattgatactcagatggcagcgattttaggcttggatgatgaacaggtggtaagcttatgtgaagaagttagcacaaccacaggcacagttgatgctgctaattttaacagcccagggcaggtggtcgtcgcaggcacagcggtgggcgtgtcaggtgttttgtcagcagtagaggcacttggtaaaaaagctgttccgctcaaggtttctgtgccttctcactgtgctttgatgaatcctgccagtgatgctttggcaaaacttttgggtgagacggattttggtgaagcaagtattcctgtcatacaaaacccccatgctaaaattcatacacagacaacacaaattaagacagctttgattgaacagttatcgatgcctgtattgtggtcaaaaaccatggaaaaattatcagagcgtggtattaatttgatacttgaatgcggtccaggtaatgttttgtcaaatttggccaagcgtcaagcaacaccgataaccgctttaccaacagataaattggcacgcctagaaaaattggagaatttggtatgagtcgaaaaattgtattagtcacaggtgcaagtcgtggtattggcaaggcaattgctaagcgttttaccgatgaagggcattttgttatcggaacagccaccagcaaaaaaggcgcagaggcgattggcgattatctgagtgaatcaggtggtattggtcgcatcttagatgtttgcaaccatgaagatattgataagctatttgaagaaattgacagtgtttatggtggaatcaatgtgttggtcaacaatgcaggcattaccaaagatggcttactcatgcgtatgaaagatgaagattgggcaagtgtgattgataccaacttaaccgctgtttatcgtatgagtcgccgtgcggttcgtggtatgatgaaagcacgccaaggtcggattattaatattacctcggtcgtcggacagatggggaatgcaggtcaagcaaactatgctgccaccaaagcaggcgtggagggttttagtcgtgcattagctcgagagattggttcgcgtggcgtaacagtcaactgtgttgcaccaggatttgttgaaacagacatgaccgaagcactagatgagcgtttggttaactctatgttagatgctgttccacgggggatccactacgttctacgagcgccggccaccgc

SEQ ID NO: 14 - DNA, 19619 bp, Moraxella catarrhalis
aggcgggcgtttgggtgatcaatgatcctttggctgtcaaagattgtaatgaaaagctgtttgccacacagtttagtgaactgatgtcgccgaccatcgtcaccaacaagcagatgcatattcaagccttcatcactgagcatcaagatgtcatcgtcaaacccttagatggtatggggggtatgggtatttttcgcttgacagcagacagccctaatatcagtgccacacttgagatgctaactcaaatgggtaaattacccatcatggcacaaaaatatattcctgctattgtagaaggagataagcgggtgctgatcgtaggaggcaagcctgtagaatattgcttggctcgtatcccgtcccaaggcgaaacacgggacaatttggcggcgggtggtcgtggcgttgccatgccattgacagcccgtgagcgtgaattggccgagacaattgcaccaattttgatgcaaaaaggactatattttgtggggcttgatgtcatcggtggtcatattaccgaaattaatgttaccagcccaacttgcgttcgtgagattgatgaccaatgtggtacaagtattgcggtggattttattaaatttattgaaaacaatattgacagccatccaaagacagatatttagtatggatttgcttgacaaaatgtcgcaaaaaactacttgagttcatgtaaaaagtcatccaaaataactgcctttattactgtaaatgtttggttggataagtttatgtcaaaaaaaatcaatgtactcatgatggcagcaggcacaggggggcatgtgtttcctgccttggcggtggcagatgaaatggtggctcgtggggctgtcattcattggcttggcacgccaaagggcatggaaaatgagcttgttgccaaacacggtcataccatgcaccacattgacatgcaagggcttcgtggtaaggggctggtgcgtgccattaagttaccttttatgctgttcaaagcggtcatggcaagcaaaaatatcatcaaaaacaataacatagatgtggttatcggctttggcggttatgtaaccgcaccgggtggcttagcagctaagctgtgcaaaattccactcatcattcatgaacaaaacgccatcgctggcatgagtaataaaaatttggcgcgtcatgctgataaagtattacaagcctttgatggggcgtttgacagcgatggcaaaaaggtgctaaccgtaggtaatccagtacgccagtccatcgccaatattgcaccgccaaaagagcgttatttgaatgatgattcaccgcttaaagtgctggtggtgggcggttcgcttggggcaaaagccatcaatgaagcggtggttgaactgttaaagctgtcggataagcccctaaccgtgcgacatcaatgcggtaaagataaccacaacaccatgttggtcgcctattcacaagcacagattgacacaagccgtcatgtctttgaggttatgccatttattgatgacatagcacaggcatacagttgggcagatgtggttatttgccgtgctggggcattgaccgtaaccgagatagccagcgtaggtgttgcagcgatttttgtgccgctaccacacgctgtggacgaccatcaaaccgccaatgccaagagcttaactgacaaagaggcagggattttgttgcctcaacatgagctgtcgggtgagacattggcacagattttaactggtcttgaccgccaaaaatgcttagacatggcaaaaaaagcacaagagagtgccaaacatcatgtcgcaaagacagtggcagagctggttttggcgtatggtgatgataaaggcagtcagtaagatgatattaataaagctaaaatatattattatcacaaattgatgaaaatgagtgaattaaaaaattgacccagttaatcatatgtaaaaccataaacattaaaatatttcttgaaatggcggcggtatagagcatattaaatgatattttttaggtggctaaaaaatcataccacattgggtagataaaataatatggtaagttcaaataatttgattgccactgcctttgccgaagtacttgccagccataaaagtatgtaatttggctaattggattttaaaatttgggtatttaaaatgtttcaatataaaatcaatgacgcattaagcctaaccttagtacattcatcatttgccagtcaaatgaatgatattgttaatgcccaaaaagacgatttgggtaaatggctaccgtgggcgaatgattttagtgaaaatagttatcgtgaatttgtcaaatttgccctacatcaatatgccgatgacaaagccattcatacccatattatttatgatgataaaattatcggagcggtgagtttaaataacatttatcatcagcttaaaaaggcagaaattggctactggttacaccaagaccatcgggggcgtggtgtcatgacctgtgcggtgcgtgcaatcatggacattgccaaaaacatctatggcatgaatgtggtggagattaaggcgggtgagcataatattccaagccaacaagttgctaagcgattgggatttgaattttgtggtatcattgccaatcatgaaaacatcaatggtgaaattattaatcatgcggtttatatgtatcggttttaatttaaaaaattgatggggtaaattctttgccttgatttgtaaaattaaaattgattgatgtgattgtcattgtttaaaaaatatcatggcatatttatccacaaaaccagtttaatattcaacatttaatatttaaaatataacacccaaacagagaaacagtcatgccaaattcaaccaaagtcaaaacgctcccaaaacgcctaatagaaatcccagagatgcgacgcattcaaaacattcattttgttggcattggtggggctggcatgtgtggcattgccgaagtgcttgccaatcaaggctatgtggttactggctcagacattaaggcaaatgcgatgaccgagcgtctggaaaacttaggtgtaacggtacatgttggtcatgatgccagcaacatcaaaatggccgatgtggtggtggtgtcatctgccattgaccgacaaaaccctgagattagggccgccttaaaagcacacattcctgtggtacgccgtgccgacatgttgggtgagctgatgcgataccgtcatggcattgcggtggcaggggctcatggcaagaccacaaccacaagtttattaaccatgatgctcaccgaagcggggcttgacccaacttatgtgattggcggtaaattaaacgcctcaggcaaaaatgccgccttgggtgccagccgttatttggtggcagaagctgatgaatctgatgcgtcttttttatctttgcgacccatggcgtgtgttgttaccaacattgatgaagaccacatggagacctatgaaggcagctttgataaactaaaacaagcctatgtgcagtttttgcacaacatgcctttttatgggctggcggtgttgtgtggcgatgacaaagagctgtatgccatgattgatgacattgcaagacctgtcatcacatatggccttgaaaaacacaacgatgtgcaggcggtagatgtgattgcagacggcacaaaaacccatttcaccgtactaagaaaagacaaaaaacccttacccatcaccttaaatatccctggcattcacaatgtctataatgcccttggggcaattaccatggcaaccgatgaaggcgtgagtgataaagccatttgccaagcggtagaaaaatttgcaggcgtgggcagacgctttgaaaacaatggcagctatcccctaacagatggcagcggtgatgtggtattgattgatgattatgggcatcaccccaccgaaatcgccatgaccatcaaagctgcccgccaaagctatcctgaccgccgtttggtgatgatgtttcagccacaccgttacagtcgcacaagggattgttttagcgagtttgtcaatgtgttatcgcaggtggataagctgattttgcttgatgtgtacagtgctggcgaggagctgattaagggggcaacaagcaatgatttggcgcgttcattgcgtgagcgtgggcaggttgaaccgattgtgttaaatgtcaatgacaaagaacaaatcacccaagtgcttaaaatcaccctaaacgccaatgatttgctgatgacccaaggggcgggcaatgtgggacaactgtgtcaagaattggtcaaaaatgggttgtttttggggtgattttaaaagggcttaaaaacttaaaaaaaggcaaaaacatgagcaagcttaatacaaaagatgggcaaaactttggcaaagtggcggttgtctgtggcggaacaagcacagagcgtgaagtgtcgctaaatagtggcatggcagtgctaaatgccttattatcaaaaggggtggacgcccatcattttgaccctgctgataccgacatatctcatttgcgtgcctatgaccgtgtgtttaatgtgttgcatggcacttttggtgaagatggcagcttgcaaggcgtgcttgatggctttaatctgccttatacagggtgtggtgttttggcatctgccatcgccatggataaatttcgctgtcgtttgctgtggcagtcgctcgggctaccaaatgtgccttatgtggttttgcatgatgacagcgatttttctgccgtagagcgtgaatttggtttaccgctatttgtcaaacctgctgccgaagggtctagcgtgggtgtgtttatggttgagcaagcaggtgatttggcaaaaatttatcccaaattaaagcaataccatggcgagattttggcagaaaaagcgatgatgggcggcgaatatgccataccactgcttggtgagcaagttttgcccagcatccgtattatccctaagggtaaattttatgattatgaagccaaatatttgcgtgatgacaccatttatcaatgcccatctgatttgacgccagagcaagagaggcaaatgggtgaattggcattaaaagcgtttcgtgcgattggggggcgtggttggtctcgtgtggattttttaaaggggcatgatggcaagctatatgtcctagaaatcaacaccgtccctggcatgaccgaccacagtcttgtgccgatggctgccaaagaagcagggattgggtttgatgagttgtgcttacaaattctacgccaaacgctatgatgtagttgtttatccatcaagaaatactccaaaaactgtggctgagctgattgcatattttgccagccatggtattactttgtgtattcaaaaaaaatctgtcaagcatcttaattttcgactgactcaatcaacactgaaggtgagtgtacctagcgatattgatgagcaagtgttagtagatggtatttatgctaaaataccgtgggcaatacgctcttatcacgcattaatgatagaaaaaccgtactatgatacgctttggggtgagagattggatgtggcaaattggctaaacattcatcaagccaatttgccctgccgtaccttggggtacctaaaaaaattaccaaaacaggcattaattacttggatttatcggtatgaaatcaagcaacagttgccaagtttattatcccaatggcagccaaaagtgggtaaaaaagctgccgccatccgcctaagacagatgtccagtcgttgggggagctgcaatactttgtctgcaaaaatcactttaaatacccatcttgcgtcttatcctttggggtgtttggcgtatgtgcttgttcatgaactgtgtcatctgtatcatgccaatcacagtgccaatttttggaaaagcgttgaaaatgccatgccagattataaatattggcatgacttattaaaataatcaaaacgatgaattatgcttcattttctgaggatgcaagtgcttgaccaaaaatctcactgagtagacgcacatcattgacacgcgcataattgagacgagtaataaaagccaatcggcgatgaggtccaggttccgccaaaggtatggcatgaacggttttttcaccgatttgttctagtgccatcttgggtactaaagttgttcccatgcctgccaagctcatttgaatcaatgtatttaagctggcatcagaaaaactagactgaatctcacttttactgagcgcacagacagaaagcacttgatcagtcaggcagtgaccttcaccaagcagtaataaatttgtcttagataaatcgtcgctgttgattttatcggtgtggatatgttcatcattttcagataagattgcaaaaaaatcttccgcccaaaactcaaacgcatgcagaccatcaagcggataaggtagggcaatgattgctgtatcaatatgaccgtagcgaacttgttcaattaatcgttcagtttgtttttcgaccacagacagttcaaaatgtgggtgtaatcgcttaagtgtcggcaatacttttggcagtaagtacggagcaatggtcggaatgataccaatggtcatcggataggcaagggggatttggtggctgtgtgctcgagtcactaaatcattgatttcgctagagattctttgggcacgctctaaaatctcttcgccgatgggcgtgatgagtacttgcttattatttcgctcaaaaatctgtgtatcaagctgtttttcaagttcagcgatacccaaacttaaggctgactgagaaatgttacattcttcagcggcacgcttaaaatgacggtgtttggcaactgcaagcgcaaattctaattggcgtagtgtgatcataacagtccttaaaaatgtaattttatcatcacttaatgatggttctattgtacctaagtttgataaaataaaacaatatctttggaagttttaactgtagaaaacggatgattttgttgtattataattaagacatcaaaaagcttagcacgatacaatcgtatttttgcttatatttatggtgtataatcaaataaatcaaccaaaaaaggtgaatattatggcagcaattattaatcaaaccattccagaattttcaacccaagcctatgtgaatggtgagtttaaaaccatcacttctgatgatgttaaaggcagctgggcgattttcatgttttatccacatgattttacttttgtttgcccaacagagctagaggatatggcagcacattatgaagagctaaaaggcttgggcgttgaagtgtatgcagtatcaaccgatacacattttgtacacaaagcatggcatgatgcgtcaccagccattggtaaagtacaatacccaatgcttggcgatggcactggcaaaatcactcgtggctttaatgtgatgattgaagaagacaatgcagcactacgaggcactttcttggtagatccagatggtgttattaaagttgctgaaatccacgatttgggcattggccgctctgctaaagacatggttcgtaaagtaaaagcagctcagtatgtgcgtgataatgacggtgaggtttgcccagctgcttgggaagcaggtcaagaaaccttgaagccaagcttggatttggtaggtaaaatctaatcgctgatcatcatatcaagccaactggtattaagcgatttagcattaagccaattggctgatttaaagcgaaaaataaacatcctcaaagtatgacgccttggggatgtttgttcatttagaatcttaaaagttatcaataaaaaatcagccattgactggctgatttttggcttaaaactttgtgcttgcttgtctttattatccacgctcagcggatactttatctaaataagttttaagctgatcttttagatgtagctttttgtgtttcatctcatcaatttcttgagcacggctggctgaggtgacgggatctttttcaaaattatcaatttgcgtatctagattattatgctcatcaaatagcttcaaaaagtgcttatcgccttcggctttgagtttggtcataagttcacgatattctgatagcatggtattctccttttagatgcgtgggctgattttagtatcaattgcccaattgtaatcttgagattgtatgatagattatattatcaagaatacagccgattatcaagtcattatcaagccttaaatcatcaaggtttggtaacgattaaatggagtaatcacagtatttaatattcttaattttttggatatgctgcagtaagctataatagccaaagtattaagtgagcaattaagcttggcttggtagcgtgattttatatttattttttatcgtatcaatcgatgtctttattttatttttcatccctttttcattgatattctcgggagtatatgatgttagaccaaaatttattagatgccgttaaatcctacagtgccaatatgactcgtccaattcaattggtcattggtgcaggcgagcatgaaaagcgtgccgaattgattgattttttaactaaaattgctggtacaactgataaaatccaatttgacgctcaagtgatcgataatcgtttatcaccgatgagctttaaaattaccacacaaaatcgtgatacaggtattgtatttagtggtattccaggcggtcatgaatttacttcattgattttggccatcttgcaggcaggtgggcatgcattgaagcttgatgaggatatccaacagctggttaagcacattcaagagccactaaaatttcaaacttttgtttccttatcttgccataattgccctgatgtggttcaagcactcaatcagtttgcgattttaaatgaccatattgaaaatgagatgattgatggtggtgtatttccagaattggttgctgagaaaaaaatccaaggcgtaccagcggtatttttaaacggtaaaccttttgctaatggtaaggttgatactgccaaactgattgaaaaacttcaagagcagtatccaaatttattagcatcagcaaatgaagtccagcttgaaacacaagatgttacagtcatcggtggcggtccagcaggcacagcggcagcaatctatactgctcgtaaaggattgcgtgttgcgatcgtggcagatcgtatcggtggtcaggttaaagatacgcaagatatcgaaaacttaatttctattcctttgaccaatggtaatacattggctgcgaatttggcaacacacataaaagagtacaatattaccgtcaaagagcatgtcagcgtaagcaagcttgaggaggttgatggtggctatcaggtgactttaagcacgggtgccagctggctttctcgtactgtgattttggcaactggtgccaaatggcgtaagcttggtgttaagggtgaggatgaaaatattggtaatggagtcgcctattgcccacactgcgatggcccattttttaaaggtaaagatgttgcggtgattggcggtggtaactcaggtgttgaggcggcgttggatttggcggggattgtcaatcatgtgactgtcttggagtttggtgactcattgcgcgccgatcaagtgttaattgacaaagctgaagcacgagagaatatcacaattataaaatcagcagcaacgaccgaaatcactactgatggtagtaaagtgaatgcgttgatttatcaagatagagtgagtggcaatagccaaacattgccattatctgctgtttttgtccaaattggcttggtgccaaattcagagattgccaaaggcttggtaacaatgacgccgcaaggtgagattgaaattgacgccaaatgtcgcacaagtaaggttggtatttttgcttgtggtgatgtgacaacagtgccatataagcagattaatattgccatgggtgagggttctaaagcaggattagcggcttttgagtatctgatgatgaatggctgattttataaatattgaataataaaaatgtaatcatgcactgatatatcgtgcatgattttttatccaatcattttaactcaattgattaatggcagtggtttttgatataaactaatttattaaaattgtaaattttatcaatccttagtgaattcgttaattggtttcaaggtaagtatcacggtaaacatacgccatatgcaccaatcaatatcggtacttttattttattgatggaagctgtggcgtgaaggcttggtacttaggtatgataggattaaaaattgaatgattggctgatcaaggcgtgtatgatacaataaacgattggggcatgctggctctgagtaactataaaatcatctaaatgggcttgggagattatgatgaaactaacttggcaagatactttagatatcgccatcgccttgagcgaaaaatatccaaatgaagatgtgcaatacattcgtttcaccgatttacatcaatatgtgtgtgaacttgaagattttgatgataatcctgatggctctaatgagcgaattttagaagccattcagatggcgtggctagatgagctataacaataaacccgagtgtttgcttgggttttttattgcacttgatgagttatggcttggtttaaataccaaacgctctatgtatcatcacgccaattttatcaccgacatggtgggtgcgatgacttgttgccattgagatttgcatgagcagtatttgttcgtcatgagtttgtagggtatatagccagtaaccgccatgaaaatctctatcaatcacggtaacagcgatggcattagggtcttggcttggcttgacatcatggggacgaatcagggctttttgactgcccaaaggtaaaccaacggcaatacgcccaaatgaggcatcaaaatttgactctgttacctttgtggcatcaatgagtaccccttcaccgataaatcttgccaccgactcattgacaggctgatgatataacgcatctggcgtaccccattgttgcaatctgccatgagtgattaacccaaccacatctgccattgcaaaggcttctgcttggtcgtgggttaccaaaatggcagaaacattttgggagataagcaggcgacgcacttctttggagaggttggtgcgaagctcaacatccaaatttgaaaatggttcatcaagcaaaatcaaactcgggcgtggggcaagtgcacgcaccagtgcaacccgttgctgttgtccccctgacagctcatgtggatagtaattggcatactcactcatcccaatgagtaccagcatttcagccacacgctcggatttggcagttttatccatggcagagagtccaaaagcaatattatccgccacggttaaatgtggaaataaagcataatcttgaaataccatgccaatttgtcttttatgggcggggagatggatatttttggcatacagtggcttgtcttgaatataaatctcaccactatctggcgtctcaaaaccagcaatacaccgcagtagtgtcgttttaccacagccagaggcacccagcaggcaggcgatttgacctgatttaagatgaaggctgatgtcagttaagatgggtttgtggtcaaaactgatacaaagattgtcaatacgcaacatggttttctcagagtgttaaatggatgagtgattatttttgattcattttagaaaataagatgacaggaatcaatccagttaaaatgatagcaagtgctggaaaagatgccttgtcatacaagccttcactggtaaaggcaaatatcctaaccgccaatgtatcccaattaaacggacgcatcatgagcgtgatgggcatctctttcatggtgtccacaaagaccatcaacatgctgacgccaagggcgcttttgatgagtggcaaatagacacgatacaccgtaccaaaaggtgttgctcccagtgaagccgctgcttctatgtgtgtgttacgaatgcgtttcatgccagcatccaccgattggacacccaaagccaaaaagcgaatcaataaagcgatgagcatggcaaagatggttcccttaaaaattgcatcgctgcctgaaaatacagccatattggtaatgagccaattatcaagccatgcaacaggcacaaagacaccaacagccaataccgtacctgggatggcatagcccagtgtggatattttggtggcaatcaaagcatagcgacttttatccaagccagatgcgatggcgataaataatgcaaccacagcaaccgccacagcactcattaggctgatgctgacagagtgccaaatttgcatcagtaattcaccaagcacaatttgttgccaacttgacatcgcccatgcggtcagctgaatgattggaatgacaaaagacaaacataaaatcagcccacagtacaaagtggcgaaccattttttatgaccagttaagacaatatttcggtgatgactggcgcgccctgtggtctcaaaacggcgacgaccacggcttagctgttcaagcagcaaaaaaacaaacacaaggccaattaataaacttgccaactgtttggcggtatcaagcgaataaaacccaaaccatgcttgataaattgccgttgtaaaagtgtcatagccaaagacgctgaccgcaccaaagtctgccaatacttccatcaaggctaatatgctgccgccagcaatccaaggccttgccatgggcaatgccagcttcaaaaatgactgcacggatgacagccccaatgatgcccccgcttcaagagctcggttgcccatgctgccaaaggcatttttggccaacaaataaacataaggatataaagttaggctcatgaccatcgttaagccaaagccatttctaatatctggcagaccattttcaaagccccacgcttgccttaaataagtactaatggtacctgtatagtcaaaaatacccaactgcacaaaagcaagcacataagcgggcatggcaagtggcaacatcatcgcccaaccaaaaaagcgtctcaacggaaaatcggtcatggcagtcagccaagcggttgttgtgccaagtactgttaccccaatgcccacccccagtaccagtaatgtggtatttttaagcagcagtggcaactcataatccagcaaaaactgccaaatttcagtatcaaaactgttaagtgcaaagacaatgacggataatggcaccaaaaccaacaaggcacacagaccaagccacaagcggggcaaaatggaagatgaattcatgggcatttatgataaatcaaagggcggtatcatattttaccaaaaaatgatagataatgataattcttcttgtttctatttagaaagtattatagtataatagcataaaatttgacagctttattaaccaaactgtcacattgatgcacttttttctgtataaatcacgggggttttaagacagataagttgcagttactgttgtttattgtttcatcacattgctcatagaaggatcgattatgaaaaaactagttatggctgcattggtgatggcaactgccgcaccagcgtttgccaatgaaattgtcgtatattcagcgcgtgctgatgagctattaaagcccatcgcagaagcctatcaacaaaaaactggcacaaaagtgaccgttgtcagtgataaagcaggccctttgatggaaagactaaaagctgagggcaaaaatacccaagccgatgtgcttatcacggttgatggcggtaatctttggcaggcaacacaagctggtgtcttacgccccattaactcttctgtattaaaaagcaacattccatcgcatttgcgtgacccaaaaaaccattggtttggattatcagtacgggctcgtaccattttttataacccaaataaggtcaatccaagcgaactttcaacttatgccgatttggcagacccaaaatggaaaggcagattatgcttgcgtacctctaataatgtgtacaaccagtctttggtggcaacgatgattgcaaaccatggacaagccaccaccgacagagtggtcaaaggctgggtagcaaatttggcagccgcaccatttgcaaatgacacagcactgttagaagccattgatgcaggtcgctgtgatgtgggtattgccaatacttattattatggacgcttgctaaattctaagcctcaggttgctaataatgttaaagtattttttgccaaccaagcaggtaaaggcacgcatgtcaatgtttcaggtgcaggcgtggtaaaacattcagacaaccctgccgaagcccaaaaatttatcgaatggctatctagcaatgaagcacagcgtttgtatgctgaccgtaattttgaatatccagccaatatacaggtaacgccaacgcctgctgtagctcgctggggcagatttaaacaagatttcatcaatgtatcggtagcgggtcaaaaccaacaaaaagccatcatgacaatgaaacgagcaggttataaataattaaataaatcattctgccaatatctaaacatcaaaaagcactttggtcaaatcaaagtgctttttattgagcatcactattattaagattattcaattaagcttatcaaaatttcttcataaatttgagttaattgttctaagtcttcaatatcaacagattcatccacttggtgaatggtggtatttaatacgcccaattcaaccacttgtgcgttcattatgggtgcaataaatcgcccatctgaagtgccgcctgaggttgatagttgggcattggtgccagtgactgttttgatggcatcgatgcacgctgaaacaaattctcctttttcggtcaaaaaaggcacacctgaaagcgtccactcaatttgataggttgcatcggtatgtctaaaatgcttatcaaaaatggcgtgcgtttttgccatcaagttttcagcagtattttccgtacaataacgaaaattaaacaaaatctcacaagtgccaccaataacattggtcgcacccgtaccagagcggatattagaaatctgcaaggaggttttggggaaatattcattaccgtcatcccaatgcgtcttgatgagctcatcaagtgcaggacaggctgcatgaatgggattgattgccaaatgggggtaggcgatatgtccttgcttgcctgtgacagtcagtttggcatttaaagagccacgccgaccatttttgatgacatcgcccaacgactgcgtacttgatggctcaccgaccaagcaaaagtctatcttttgtccgcgctcttttaaggtttgggcgactttgattgtaccattaatggcaggaccttcctcatcagccgtgataagcatggcgatactaccagtatgattaggatggttttttataaaattttcagcagcaatcacaaaacttgcaatccctgttttcatatctgatgcacctcgcccatataatttgccttcatggacggtggcagaaaatggtggaaatttccaagctgattcatcacctattggtaccacatcggtatgacctgcaaaacacaagactggtgcgtttagatctcttccttttttaattgcccataagtttttgatttcggcatgatctccagagtcatttggatcaccaaaatacataaactcacagtcaaaacccatcttggataaatgcttggcgatgatattttggcaatttttatcatcaggggtgacagatgcctgctggataagttcaatggatagggcaagttctggagagttagtcatagcatttcctaaatggtgatttcttcagttggattgtgtgcaggttgttgattggcaacaaatacagtcgacctagatcgatgatgtgattatggtcatgaagtttgtcaagccagtgcatgggtatgttatcaatgccatgataagcaccagcgattttcctgcagatggcggtgatggtatctgtatcatcacgctgcatccaagtggcgatcgaaaagcaggcacaatgagtgctttcacttgatacaacagattgctgtcaaaaataacagattaatttaatttaggcaatagggcgataggtgggataaaggtcatggaattgacttgtatttattaaaaaacgctttgcccaataaccataagtatctatccaaatcctttagggtacaatttatcttataataatgttgaaattctatcagtgttagcttaaattgacagtaatcttttaaatcttcatttttaaaagagtaaaatttgtctttgtggcgaaagtgtcttagtactttatctacatatgcatcgtaaatggggtgattcatagcatcatgatggctataatattttgtggcaaatgaataaaagtttttatttttaccattaatggtaacattttttatgtccataactaaatctgcatcaccttcttttaagtacttatcaatatctaatgactgaattttttttgcaactggataaatagtaaaaatatttgtgctataaaaatcattaagtactgaagatttgatcaagatttctgatatgtcgttatttaatggcaacaactcatggaataatttatttagggattgttcttgcatgcggtaattttcaagttttttatcatttttccattttttgcagtaatgattaagttgttgttgacacggtgtcggaatggtgactttttccatgaaaaatccaataattaaatataagattgtatgatttgattgaaaagtttggttttaaagatggctatcccgtctcatccatgtggcaatcgaaaagcggtagcgataagtgatattgacttgatgtttaagattgctgtcaaagattaccaagcggttggctttgggctgtagtgtttgttgtttacccgtcttgtcaataaccaaaatctctccgccatcagttgtttgccaatcatcgttcagataaaatacggcagaaataacacgatcatcacgacctttgggattatcgacatgccactgatagccaaatccgacagggtagcatgcataatgtgcttcgctacggcgaatccctgcatacaaagtttgattaaaatatttagccagtaacatgatgctgcgtaaatagtccataccaatggggcagtcttcatcaatccagcgaatacgatcaccacgaatactttgctgtctctcaccgtgggctagcgttgctactttatagtcaataaaaccactttctttttgaagtgataaaacatcttgttggtcaaatacctcatctaataccaaaatacccgtttgcaaaaaagtctccaaccgattatcgattaaccttgaccaatcaacacaaaacccttttttgggcatattcaaagtattcaccatcatcacctttgttataactttattaaaattaaacgctgctatatactcagatttacttatcaagcctttataaataggcatagcgaaatatagctatttatgataccataaataattaaccatctaataattttcacttatgaactacaaacatgcctatcatgcaggtaactttgctgatgttgtcaagcacattttattgttacaattattaagccaatttagtgctaaagccaagccattttatgtgcttgatgcctatggcggtcgtggcttgtattcattggcaagcagcgaaacccaaaaaacccaagaagcacagcgaggtgttgttgtgcttgagcaagccgttaaggcaggcttggacggactgccaaacgctgtcagccgatatttatcagacttagcgtttgcccgccaaaaatacgaccaatatgtctatcctggttcaccctggtggattgcccatcatggtgaatatcactctacaaatgcaccactacgagcagaggcatttgaaacggtggcagatgagtatgatgcactcaattatcagctttatcagttgccaatcggcattcatcatcgagatgcctttgagggcgtgcgtgctgttataccgcccaaagaaaagcgtggcatcattttattagatccgccatttgaacaagaacataaagactttagccgcttggtagatttattggttagcagccataaaaagtttgcgacagggacttttattttgtggtatcccattaaaaatattgaggcagttgaattattttataaaaaaatgaaacgcactggtatcaaaaaacaactggtctgcgagttaaatttatatcctaatgatgtcgctgttggactaaatggaacgggtctattggtcatcaatccaccgtggcaatttgccgataatgcccaagaagtcattgagtttttggcacccattttaaagcccaaagatgcaccccaaatgactcttggtgagatggcagtggttaagtggttggttgcagaataatttatcacaaagtcaagttaagatagctttggatgtctaataaataaaaaagggcaattatgtcagaaattcaaaagcctgaaacgcatactgcatcaaacgagcatgagcatgatggcatcacctttgaggtgattgagcctgagcattcaggtgataaacgcattatgacttcaggagtctatttgattccaaatttaattaccactttatcactattttcaggattttattccattattttaagcaccagtgcagattatcagcgtgcagggcttgcaatttttgtttctgctttcttggacggcatggacggtcgagcagcgcgtatgtttaatgcccaaagcccctttggcgaacaatacgactcattggcagattgcattgcatttggtttagcaccagcaattttaatctacagttttgctttggcaccattgggtcgatttggcatggcgtgtgcatttgtttatgcagcttgtgcagcatttcgtttagcaagatttaatgtccaaatcgatgttgtggataaaaaatattttattggactggcaagcccattggcagctttattaattgcgtgttctgtcttagttgcagctaaatatgccagtcttatgacggcaatacccaccgcattaacttggttttttgctctttggacaattgtctgtgggattttgatggtcagcaatataaagtattattcttttaaagaatttgataaacaaaaagttccatttattgtgctgttattggctgttttggtatttggtgttgtgttgtatgatattccagttggcttattggcgatagggattgcttatgtattatcaggttttgtgaccacattaaataaaaaattttaacaatacaaaaaaattttcagaatttttaaaaaagtgcttgacgccaataaaatttagcgtataatagctgtcgttgattgcaacgatggtttttaattaatcaaattatcatgcaaaacaaacaaaaaaaccgcttgactttaaaacattccatgttataatgttcagctcaagttaatcagacgatgattaacacactatttaagatccagactaaagaacaacttgtgtggatttttgtcaatacaagatacttcgataaattatcattcattgatacttattacttatcttaattacttatcttaagtaaggcaaaaatactcaaagttaattcatttac

SEQ ID NO: 15 - DNA, 28626 bp, Moraxella catarrhalis
tcgatgaagacatcgccttatctaagtcccagatggatattggattgaaattattgagattaataataatcgctaaatagatgatagcgctaacacaaaaaacgctggcattgtccagcgttttgataagatggtgtgcttgccgggaatcgaacccgcgaccttcagcttcggaggctgacactctatccaactgagctacaagcacagaaatattttttgggtgcgtttggatgcataaatataaaccgctcaattgtagcaagtttttgggaaaaatgccacctaagctgataaaataatgacaaatttatgcaattcttgctaaattttaacagattctataaaaaatatggctttttacctgacttttcccttataataatagggtgaattttatattgtagggatggtggctttgcacaatgacttgcaccgctgttcgacacccccagagcgattgctcaaggctaaaacgagatgatgacaatgaaaaaagctgttatgttttctgttgctgcattgttagcagtgtcaacaatggcaacccaagcacaagaagctgtcgcacctgcagaaactcagactgctgatgcaactgaagtaactacagcggaagcccctgctcaagcggcagcgcctgtagaagaagcaccaaaagaaagtccacaggttcaaaagcttgtggcgatgtatcccaatttgatcgctcgtatagcaccttatggtaaagtttgttttgatggagaagaatgtgatattaatatcacagtacttgcaccagccgttgaaggtcaagctcgtgatggcgaaagcttgtataaagccatatgctcaacttgtcatgatgcaggcttgattggcgcaccaaaaattggcaccagcgattgggcatcaagaatcggtaaaggcacagcaacgctttataatcatgccatcaatggttttaatgcgatgcctgctcgtggcggtgctgatatctctgatgaagaggttcaaaatgcggttgattatattatccagcagtcaagctaagccatcatataaattatctatttaaactatcccaaatcattgtttgatgatttgggatttttttatgccagtcattataagtcttgaatggtaagccttgaaaattttacatttgtctatatttatttatcttttgtggtattatgatttgtctgatcaatccaaaagcatcaaccaatgtgccaaagcctaaaatttgtgattcatctttagagtgccattatgacaaaaagcccagattatgcccaaccaaacatacccgccttgcaactaaaaggactcagtaaaacctaccataatggttttactgctctaaaaggtattgatttgactgtaccacaaggtagtttttttgcgttacttggtcctaatggagcgggcaaatcaaccaccatcagtattatcagctctttatttcccccttctgctgggactgtagaaatttttggtattgatttggtcaaaaaccctgcaaaggcgaacaatttttgggtattgttccccaagaatttaattttatgcaatttgaaacagtacaagatattttaatcaatcaagcaggatattttggcattaccgctaaagatgccaagctaagagcagaagagttgctcaaagcattgggtttatgggataaaaaagatacgaccgcaagaatgctttctgggggcatgaaacgccgcttgatgatagctcgtgcattgatgcatcgccccaaattattaattttagatgagccaaccgcaggcgtggacattgagctgcgtcgctcgatgtgggaatttatagaatgcattaaccaagaagaaaaaaccacgattattttaacgacgcattatcttgaggaagctgagcagctgtgtaaatatatcgctattttggataagggtgaaattcgtattaataccgacatgaaaagcctgcttgccagcttggatgttgaaagctttattttggatttttcaagaccatttgagccgcccattgtgcttgagcaggtcttacattatcaaaaaattgatgcacaaagccttgaggtcacgctcaaaaaaggtgaaagtttaaatgatgtctttgcacaattatccaatcagggcgttcaaattgccagcatgcgtaataaatcaaatcgtttagaggagttgtttatgaatttggttgaagaaggtatcaccaatcagcttggttaatcatacctacttaattttgaccaaatcattaataaccactcatcagataaccagccaatttaagagtacgccatggattttagtaagcaatcggtagcatttttcactattttaaaaaaagagattaaaagaatattacggatttggctacaaactttattgccacctgtcattacgatgactttgtattttgtggtttttgggcagatgatcggtagtcgcatcggtgagatgggcggtgtgtcttatatgcaatttatcgtcccaggcttgattatgatggcagtgattaccaatagctactctaatgttttatcaagtttttttagcatgaaatttcaaggtagtatcgaagagcttttggtttctccactttcaaaacatacgattttattaggctatgtgggtggcggtgtatttcgtggcattgtcattgcattgcttgtaacgatagttgcacagttttttactcagttgacggtggtgaatttgggtgtgatgctgatgactatcttaggtacttcagtactattttcaattggtgggttgattaatgcgatatttgctcgctcatttgaggatatttccattattccaagttttgtgctgacgccattgacttatcttggcggtgtcttttattcgttagataatttatcatcattttggcaaaatttatctttacttaaccccatcgtttatatggtgaatgcgtttcgctttggtattttggggcatagtgatgtcaatgtttggtggtcgctgattgcaattttggtattttgtattctgctttatggttgggcgtatcgcttgttggtcaatgggtcgagactaagattataatctattaaccaaaattattaaaaaataatgaataaaatcaacaatttaaagtataaacttagcttgagtgataaaggagctaaacaatgagtattcatggtgttttaggtgagacaacaagttatccaaaaaattatgatgccagtatattatttgccatttctcgtagtttgggtcgtgatgaagttttaaaacaaactggcattcaagctgatcagctgacagatggcgtggatgtatggcaagcgtttgagttgtcatggctaaacttacaaggtatttgtaaagttgcgattgctcgcattcgcattcctgccaactcacccaatattgtggaatccaaatcattaaaactttatctaaatagcttgaattttaccaaatttggtgacatggcagaggttcaagcactcatccaaaaagacttgtcggcttgtgtggggatcaaggtgagtgttgagattgtaccacttggcggcagcggctttgaggtacaagagccactgggtgtctgtattgatgaggtgcttgatacagaaggtgaggttattgcttgtgatgatattaattcagcgatattaagtcagccacctgtgcatcagatgatgacttatcaatttcataccaatttattgcgctcaaattgccctgtgaccagccagccagattgggggacgctgtcagtttcaatcacaaccaacaaagccttagattaccaaaaaatcctaagatatgtacttaccttccgtcagcataatggttttcatgaacaatgcgttgagcgtatttttgcagattttttagtgaattttgagccatcggccttgatggtgcaagccaactacactcgccgtgggggtattgatatcaatcctgtccgtgtgctaaaccatgctttgccagctgtaactagacaggtgcgtcaatgaatgatggataaatttgctaaattattcaaaaaccttgtctttatgacaaggttttttatagcactgattttatgatttaaattaaaataatgccaatagttcatctaggcttagcatttgctgatcacctgtggctcggttggtgtattcgtatttattttcggcaagatttctttgtgaaactacaatacgatgcggaataccaatcaattcaaggtcagcaaatttgacccctgctcgctcatcacggtcatcaagtaatacattaataccacgagcttttagggtttggtatagcgattgggccttagcttccgcatcgccatctttggatttcatcggtacgatggcaacataaaaaggagcgatgctatcagccttgtcttctggttctgcccaaatgatgccattatcatcatgattttgttcaatggcagcggcgatgatacggctgacaccaataccgtagcaacccatcatcaaagtgacaggtttgccttcttttccaaggacagagcagtttagggcttttgaatatttatccccaagctggaaaatatgacccacctcaatccctcgcttgatactaatgatacctttaccatcaggagaaggatcaccatcaacgacattacgaatatcaacaatttgcgtgatggtggcatcacgatcccagttcatgcctgtggtatgtttgtgttcaatatttgcacctgacacaaagtcagataatgccgccgccgcacgatcgacataaacaggcagctgcaaatcggtactgatatagcctttgataagtccaatttctttgagttcatcttcggttgccatcgtcaaaggcgtatgagcatcggcaattttttcagccttgatttcattgagcgtgtggtcacctcgtaaaaccaaagcaataaatttgggtgcttctggattatcttggctatgacgacctttgacaatcagtgttttgacggtttggctgagaggaatatttaggtgctcggcaaccgcttcacatgtggtcatatttggtgtatccacatcggtgcgtgcttgtgttggtgctgctcgcttatcataacaaaccgcctcggcaagctctatattggcagcaaaatcagaatcgcttgagaacgcaatatcatcttcaccgctgtctgccaacacatgaaactcatgtgacgcaaagccaccaatcgagcctgtatctgcttgtacggctcgaaaatttaatcctaagcgtgtaaaaatgcggttgtaggcatcgtacatgtcttgataagtgttggcgagcgattctttatcaatatgaaaagaatacgcatctttcatggtaaattcacgcgcacgcatcacaccaaaacgaggacggatttcatcacggaatttggtttgaatctgataaaaggtaatcggcagctgcttgtagcttttaagctcattgcgtgcaatatcagtgatgacctcttcgtgtgtcggccctagcacaaaatcacggctgtgacggtctttgaatcttaaaagctcagcaccgtaatcctcccagcgtccagattcatgccacagctctcctggctgggtaactggcatcaaaagctcttgactatcgattttctccatttcctctcggacaatacgctcaacgcgttttagtacacgcaaccccatcggcatccaaacatacaaccctgaggcaagcttacgaatcagacctgcacgaagcatcagctggcttgaggcaatatcggcatcattgggtgtttcttttaaagtggcaaatataaattggctagctttcataaaataactcttataagatgaaataatttaaacaagataatttaaacaagataattgataatttgatttaaaattaaggtgtatttactggattttatccaataaagtgtgataaaaatgacaataaaagtttacctgattcagccaatttgatgaaaagatcatacaatcaacgcatggcacttcaaaaatcagcattcaatgacttatattacggtaaatcttagataatatgcaacaaatttttgttgattttgcatacatttgtaagcttttgtggtattttaagcacttattattttcagctgtcaaatgtgtttggctgattgcgtgattaaggtgatatgaaacaagtcaaattttgtggtttaacacgccctcaagatgtcagtgctgctgtttgtgcaggggctgatgcgattggactggtattttatccacccagccccagagcggttgatgtcttacaagccaaacagcttgtggcaaatattcctgcgtttgtcagtgttgttgcccttgtggtaaatatcgatgatgatatgctgattaaaattgcccaagcagtcagctttgatatcattcagtttcatggcgatgaaacggcggatgaatgccaacggcaggcggcacttgtaaataagcgttggattaaagccgtgcgtgttgatgcattacgctatgacaccaagggcattcaaaagattatcgatgattatcatgccaaaggtgctgcatcgattttactggatgcttatcacgctgataaatttggtggtacaggcgagcgttttgactggtcaattattccaaaacagtcatcattaccgattattttagcgggtggcttgacgcctaacaatgttgcactaactcggcaattgccaatttatgcagtggatgttagcggtggcatcgaattagccaagggcattaaagattttgataaaatgaaagcttttattgaagcggttagatagattttgcttgaaaatagatggtggctggattggtggtatcaatctgctcaaacctatgcaaaacttgcgattgcatgagatatttaaattgaataacacctaatttaaacgattaaaaagggcaatatatgacaacacaatttaagtttggacaatatcctgatatcaatggatattttggtagacacggtggtcgttttgtgtccgaaactttgatggcggcacttgaagagcttgacgaaatttatcaaactgccaaagctgaccctaagttttgggatgaatttatggcggatttaacggactatgttggtcgtccgacaccgctatattttgctgaacgcttgacccaacaagttggtggcgctcagattttttttaagcgtgaggatttaaaccatacaggtgcccataaagtcaataataccatcggtcaagcattgctcgccaaaatggtgggcaaaaaacgcattatcgctgaaacaggtgcaggacaacatggcgttgcaaccgctaccattgccgcacgccttggcttggaatgcgtggtttatatgggtgcagatgatgttgagcgtcaaaagatgaatgtatatcgcatgcgccttttgggggcaactgttgtgcctgttacttcaggttctcgcaccttaaaagatgccatgaatgaggcgatgcgtgattgggtggcaaatgttgacaccacttattatatcattggtacagtcgcaggcccgcacccatatccgatgcttgtgcgtgattttcaggcgattattggtcgtgaggcacgcatacaacatttacaaaaaacaggccgcttgcctgatgcattggttgcatgtgttggtggcggttccaatgccattgggctattttatgattttttaaatgatcatgaggtggtgatgtatggtgtggaagccaatgggttaggcattgatacacccaatcacgccgctcctttgcaggctgggcgtgtcggtgtattgcacggcaaccgaacttatctaatggcagatgatgatggtcaaattctaggtacgcattcgatttcggcaggtttagattatccaggtgttggccctgaacacagctttttaaaagatattgagcgtgttcattatgtcggtgtaacggatgacgaggcattacacgcctttaaagaagtgacttcaaaggagggtatcattccagcacttgaaagctcacatgcggtagcttatgggctaaaattggcggcgaccatgaagcctgagcaatcaatgattattaatatgtcaggtcgtggtgataaagatttacatacggttatggcaaaagatggcatgcaaattgattaagccacccaagcgaccgatagcgaatgatttgatgagaatatgatgaaaacaagaattgaaatgacttttgagacattgcgtcaagcgggcaaaaaagccctgattccttatatcatggcaggcgacccatgtcctgatgtgacggttgatttaatgcataagcttgttgagcatggtgcggatattattgaggtggggttgccttttagcgacccgatggcagatggtcccatcattgcccatgctgccgaaagggcattggcggcaggcgttagcactcgtgatgcactaaatatgattgctaaatttcgtcaaaccaaccaaacaacgcctgttttagtcatgggttatttaaaccctgttgaaatcattggttatgataattttgctaatttgtgtgctgatgctggcgttgatgcaattttgatggtggatttaccgcccaacgaagcagatggctatgcaaaatcactgaccgagcgtaccgatcatcccatgaatcaaatttttttgctggcaccaaccacaaaatcagatcgccgtaccaaggttatcgaaaactgtagtgggtttatttattatgtgtcactcaaaggtgtcacaggttcaggcgcgcttgatgtcgcagccgtgcgtgagcaggtagcaaaaattaagcaacaaaccacaatacctgtgtgtgtgggctttgggattcgtgatggtgattcagccaaggcattgggtgcggttgctgatggcatcattgttgggtctgaattggtcaagcattttgctgattgtggtcatgatgaacaaaaaattcagcaagccaaggctgggttattaaacaaaatggatgagcttagaaaatcacttgacgagcttacatcaagtaccaattaatattaaattaactttaacaagttatttagttttatcatgattaagtggtgccaaaaatttacaaagtttggttgatgagtttggtttataataaatgcatcataagaccaaagaatgattgggtaaatagtgtttgccaaaattaatttacaagtgtaaactatatgccgtattgggtggatacccaagtatgtttaaaggatgaattatgagtcaaacccaaccgacagagccagttatttggctaaagcgtgaagtaccgggcgttaaacgcacaaccgttccgacactaacggctgttgaaactgagccatcaaccgaatgcccaaactgtcatgcactgattaccaataccgcattaatcttaaatcagtatgtatgccctgaatgtgatcatcatttgaccatgacggctcgccagcgtttggagtagtttttaagtagtgtagaaacagagcttggtcaagaatttataacaggcaatccattaaattttattgattctaagccatatcctgaacgcatgaaagaagctcaaaataagacgggtgagtctgaaggcttggtggtcatggcaggcaagcttaaacatttggatatcattgcttgtgcgtttgattttcggtttatgggcggttcgatgggttctgtcgtgggcgaccgctttgtacaagccgccgaaaaagccttgacagagaacaagcctttggtatgctttgctgcctcaggtggggctcgtatgcaagaaggcttattatcactgatgcaaatggcccgcacttcagcagctattgaaagattgaggctggcaggcgtaccttatgtggttattttgaccaaccctgtctatggtggtgtgacagcatctttggcaatgcttggcgatgtacatatcgccgaacctaaagcaatgattggctttgcaggtaagcgagtgattgagcagactgtgcgagaagtgctgggtgagccttttcagcgtgctgagtttttgcttgaaaaaggtacggtggatatggtggtgcatcgccatgagcttatcaataccacgcatcgtattttagcaaaactaacaaaatctgccgtttagccttcacttaaatttgatgcattaaagacgctttgtgggcgtcttttttattatcaaaagatcatcttgaataatgaattgtatcttgatagaattacttcttatttgtaaatgaaaactggttatggagaatcttatgcatataaaaatggctatgatggtaagcttattaagtttgggtttattaagtcaaaatacatacgcacaaacgcccagcgatgaatcgatcgctcagtgggcgcggattactgattttaaaaatgattttgagcaaggcgtggtaattggctatatcaactctgctaaaacaagaatcttattatccattaaaaaagcttatcctgatgccacggctgaacaaattgccgctgccgatcagctaattgaagatatgcttaagcaacccgccgaacgagtttctgaaaacccacacttttatcagaaagtgcaacaagtatttaataagacggtaaaacagcatttcacgcaacaacagatggatgctttgattgagttttatagttcaccaataggtaaaagtatacacaaaaaacaaatggcgtttaatcgagatctcataaatagcttatcaaatatcgtcatggagatggatgaattgggtacgcccaaagaagagcttgaagcgatatatgataaattgttcccgcaattacatcaaatttttgaaaaataaagtcacactactgccttgaataaaatcctccaaccctgagtgatttttgttttaaaagcccaccaaaccaagtacaatagcctaaagtatttgggaatcataattatgacaagaactttaagccagtggctagaatatattggcggcattcatgtgtctgccattgatatggggcttgagcgggtgctgcctgtggcaagttatttgggcattatcccgataaagacccaacaagatcagacggacaaaaaaccaatcatttttactgtcgcaggcaccaacggcaaaggctcaaccacgaaaactatcgctgccatttgtgaagcttgtggtctaaaaacagcactgtatcagtcgccacatttggtatcttttacagaacgcatttgtattaatggcaatgaaattagtgaaagtgatttggtggcagcgtttgaggcggtagaaaatgcacgagtggccaaaaatgtcacgctgtcattttttgagatgacgactttggcggcattttggcattttaatcaaaaaaaatgtgatgtttgggtactagaaattgggcttggtgggcgattggatgtggttaatatcatcaatcctgatgtggcagtgattaccaatattggtattgaccatgtggattggttgggtgatgacattgagcgtatcggtcaagaaaaagcgggtattattcgagaaaatattcctgtcatcttgggtgcaaggcagttaccaaatagtgtgcatgaacttgcaaatcgtttgacaaagcatgtgcatcagttgggtgtcaactatgattatatggagcaagatgagacatggattttttcaaatgcagcgttaaccatacaattacccaaaccaaaattatcgttacaaaatgctgttaatgctgttgcagcggtgctagaaagtgggataaaaattcatttagatagcgtgatcgacggacttcatcaggtacaactggcagggcgatttgatcagcgtatcattaatgatcggcattggatatttgatgtggcgcataattcacatggaataagcttttttttggcacaatgggctgatgaatggcataaacacaaaaaaatatatccggatgctaagcttaaggtcatattttcaatgttgggcgataaagatgttgatgcggttcttgaggtgattaaagctgcccttgatgataaaaaaataagcatccatgattggtctgtcgccgcaattaatcatcctcgtgcgatggatttacagacgcttttgggccatgttcatacgcatatccagccatcaaaccttaaaatataccaagatttagcacaagctgcccaaagtgtctcaaccgatgccagcacccaagatttgattgtggtttttggctcttttcacaccatcagcgaaactttggtggcgttattgggcagaccgtattaggacatcaatcagctttttatgtactggtcatttagacaagtgtgattgttatcgctttgggcagtaatcataatgccaaaaataatagcgtatgcaagatttacgctattattttggtggatagtgatgctatcctgctctgccatcaatacgaggtgttcgccatatattcatgtagctgacgctaagcaagaaaaaggctatcaaccataatatttgtgcgtgaatgatccatattaccagatgttgtggcataagccacggtaaaatcacacgaaaaactgttgccacgcttaataaactgatagcccaaggcactgtttttggtggttgatggatgctacgccctgagtgtccaaggctgacgcgtgccatcatagaaagactgagtatgccaatgccgccaactgccatcatatgcattgctaatgaattggtgatgccaaattggaaaattcgcaaaaaatacatgagctgcccaaatacaatgcaggccatcgaaataaacatactccagagcaaaggttttttccaaatcccttgcgtataccacccttgaagccgccaagcttgtactaatgcacaaaccaacgcacataaactggcaagcagctgctgtgaggcaaaaacctcaagcaagaagaaaatcacgaaactaatcaagctgatgcgatcgatgtagtgattattgcgtggttcaaacgcatagcccacaccccgtgagataaaaaaaggcgttacccgccttcctatggtaaggacaagaccgataatcacaaaagcccctaaataaagtgcataataccaaccaatgtgccagcctaatgttgctgcaagacagaataaatttgcaatcagcattaggataatttttgataaaatgcccatttgtcgccattgtttggtttttatcacaggctttgtaatacttattaaaaataaaatcgtaaatacaatatctgccaatacacctagccataaaaactgtggtaaaacaatgaaaataatgcgtgcaaataaccacggcaaccaaataagataaagttgttgtccgctcggcatggtttttcctgtccagttaccaacagcggtcaataaaaatcctgccacaactgccattgagtagccaaaaaccatttcatgaccatgccaatattgcggtgcaatgctcatatgggcactaaacacgccgccacgatatacaaatagccaaagcaccatactaatcacagcatataccgccgcacttgcaaaaaatattcggaaacccaaattaaaaattgctcgatctgccagattcggaagcattttattcatcaaaaaatccttactcgccaaatttttgatttaaattcatcatatatatgatttaaatcataagtatattatagtcaattcatttcaaaataacacatgattttaaaattaattatcatatgacattcatctaagaggtttgatagaatcaaaggtattttgataagattgatgataaaataaaatattttggtggcagattggtcatatcacacaaattttatccatgataatcttgacaatttgataaaaaaactatatttttaatggtttgggataaaattagccttatgattacacatgcaaattctatccataaagtcaataacaggtcggtggtttggttatgatttctaaacaaattgtattgggcattacgctggtcattggtagcggcgtggctttttttgccttggcaaaaaatgacactcaaacaaccaaatcagtacaaacgccccagcagataccaagtgataccaaggtggcaaaacctgtggttcagcctttgacggcagatgtggctaccgaagaaaagctacttgccgaaaagcagcgtgtgcgtgaagcacatacgcttcaaatgcaaaagcaagcagctgccttgcttgaagaacaaaataatgcacgcaaacaagcacttgaaaaagccagtgccgaagctaatggacgcatgacgaacgatacccaaacagtttcagcggacagtgctgccaaaagtgagttgatcgcagcaccaacagttcagacacgccccgaagcaatcgaagctgcccgtaaggccgaagaagccaaaaaggctgctgagatgcttaagaactctgaacaagaaacaaaggatgaaaaagccaaaaccgctgataaacccaccgaaaataaagctgaaaataaaaaagagaataaaaacacccaaaccaaagcacctgtgaaggcgggtactcacgatgttcagcgtggtgaaacttggcagggtattgcgaatcgttacggcatttcggttgccgccttggttgaagctaatggcgtgacacgcaatgatattttaagagcagagcgtcgtatcaagataccatctgcatctcaaatagctcgtttggagcgtgataataaagccagagaatccgcatctaaagacggtaataaaaaatctgacaatcagcctcaatctaagacagataaaaaaactgaatcaaaatctcaaagttcccaaacatctgagcggtacatggttcaagtggcaatctctccagataaagatcgggttgatgaggtggttaaaaagtatcgtgatgctggctataaagtcacaaccagcaatacaagtcgtgggttgcgtatcttggttggtaacgaaaaaacagaagaagaagcaaaagcactgcgtactaagattgccgcagattctcgtgtcccttcatcgggtgcttttgtgcataaagcccaataatcataagatacgctgggtaaattgtcctgtcaagtggcaaaatgtggataaacgccgtacttttttatattgctttgatacaaaaaaaagataaaatattggataatcatcttatttatggactgattggttattgatttttatttcaatatgtattaagtatgacgccattaccaaaccaaaaaagggcaatgatggaacagttaaagacactgactgtacaaatcgaacaccaaatcgccaccatcacactcaaccgccccaataaaaaaatgccatcagctttcagatgatggatgagctgattaaggttgctcataaactcaagcgtaatcgtgaagttcgagcggtgattttgatgggtgcagatgggaattttagctcagggctggatttggtggatttaaatgatcctaaaaatttaggtcttgctttgtatgaacttgccaaaccgacacccagtaagtttcaaaaggtttgcttgatttggcagagtttgcctgtgccagtcattgctgttgtacagggtgtgtgcgttggcggcggtcttcagctggcacttggggcggatattcgtatcgcagcgatggatgcttgcttatcagtgcttgagactaagtggggtttggtcgctgatatgggcattacgcataccgcttgtgatattcgctgagatgtgatgaagcagattgccatgaccgctgagatgatgggtgcaccgattgccaaggattatggactattaacgcatatcagcgatgaccctgtttgtatggcgatatctttgatagatgccatcaagatgcgttcacctgatgtagtacttgcaagcaagcgtatgatgaataccacacagcgacaagattatttggcactgtatcaagaaaagctttggcagatcaaactgatgctcggtgccaaccgcaagcttgccatcaaaaaagcaaaagatagcacggtacaatttattcagcgtcaatttgagtgattaatttagggtattaaggctttggcatcaagcatgcttagtattgatgatatttttataacatatgatcaaaacttaaaaccctatccatgattgtactaaaaatacccccatatattaggggcattgatagggagattaaacgactgctgggcgtgctattttttcttataagccttatggcaagaaccacactggctggccatttcaccatagcttgcttcaacatcagccgccgaggcagcttctgatgctgctaaggcaagtgcattaattgagctggtaaacgcttcgattttggttttaaagccttcagggtctgtccatatctcatctttagcatgaccaccttgagccatttctccttcaaagtgtacccacatggtggcattggtatcagcaataaaatcagctcgctctttaaaggtgatggcatcaaagcgacttgggtcttcaatcattgccttcatgccctcattggcatgacgccaatctttcatgagtttggcacggtcttcaacctgtggattattggcggtggcagtccctgagctgttgcaacctgctaaaataacagtcataaaacatgcagcagctaaggtaattttatgaaacatggcggcggctccgttttgttaaaataccttattttggtaaaataggttatttggtaacctaatatgattgaccaaaatgattgataaaatggctattctgattgtagataatgataacatacaatcaagataacagtgttttttgatgaagcaatacccaaaaattgacccaaatttgattaataaaccaagacaatcacgatttatgctatggcttatttgataagtttagccaatcttggggttttagataaaaatcggtcaactcaaattcgggtgtcccttgcttgggttcatatctgtattcccaagctgccagcggtggcatagaaaccaaaattgattcggtacgcccattagattgtaaaccaaagagtgtaccacggtcaaataccaaattatactccacataacgaccacggcgatatagttggaattggcgttcatgctcggtatagctttggtgtttattatgctcaaagattggtatgatgccatcgagatatccttgaccgacggcctgcatgaacttaaaacatgtcataaagtcccagtttgtggatgctgtattcatgtcatcataaaacaacccacccacgccacgacgctcatgacgatgtttaagataaaaatattcatcgcaccaagttttatacttgggataaacttcatcgccaaaaggctgacataactcataagccacctgatgccaatgcttgacatcattgagatttggataaaagggtgtcaaatcaaatccgccaccaaaccaccaaattggtgcactaccatcggtgggcgtggcaacaaataaccgtacattggcatgacttgtcggtacataggggtttttggggtgaacaaccaaagagacccccagtgcttgtgcttgagcaccaaccagctcagggtggcgtactgtcgcagaagcaggcatctgcttgatatgaatatggctaaacatgacgcctgctttttcgatgacttgcccgcctgataagacacaagagcgacctccgccaccttcgggacgctcccaagtatctgcgatgaatttggtatcggtacgaccatcaaaaccacctgaattttcttggttttcaagggcgtgaacgatggcttgttgtaagtttaacaaaaactctctgaccgcctggatttgtgcttgcataagaggctcctgatggattagggtttttggctcaaatcatctgtattgatatagtgattcatgcgttcacctttaacggttaaataagaagtgttgtgttgattgatgccaacaatcagaggaattcgctcaaccactgtgatgcccaattcatttaactcattgactttattgggattatttgtcattaaagccacttgattaatgcctacatgtgcaagcattgcttggcacatctcataagtgcgtgcatcagctggcagacctaataataaatttgcctctagtgtatcatgcccttgatcctgtagagcataggcgcgtattttgttggttaatccaatcccacgcccctcttgtcgcaaatacaaaattgcacccacgccatgtgattgaatggcactcatggcagcatttagctgtgggccgcagtcgcattttagtgacccaaacgcatcgcccgttaggcattctgaatggatacggataagaggtaatttatctgtatgattgggtaaccctgtacttaataaaatatgctcttgactatcttcattttcaaaaatatgaatgtcaaattcaccatgaatggtcggcagtttggctttggtaataaacttatacaagggaaaataccttaaacatttttaaaatcggttttttatcataaataattgcccaaatctttgggtcggtctaaccacttaagcgatgggtaacgagtgtttttacgatttgagtgttactaacatctcaatttcaataaaaatgaagcaatcaatggggtttttctagcaaaaataaagcttgtcttgtaaaataacgcatcagtaccattgtgtaaactgataataataaagccgtgattttgttaaaagattggcggtatatcatcaaaaatgctattatgccatactctttttgatgatgaaatatgaatttcttgataattggaagcgaaacagtcatgacggattcagccacctaccgccaaccatataccgccaaagtctttgatgagattttgacgatgcgtcctgacacgccgattttggattgtatcgccagccctgatgacctaaaggcactgacaaacgatcaattgattcagttggctgatgagctgcgtgcgtatttactttactcaacaggcgtaagcggagggcattttggtgctaatcttggcgtagttgagctgacgattgcactacatgctgtgctaaataccccttatgataagcttgtttgggatgttgggcatcaagcttatgcgcacaaagttttgacaggtcgccgtgaacgccttccaagtatccgttcaaaagatggtctgaccgcttttcctgagcgtgaagaaagccagtatgatacttttggcgtgggtcattcatcaacctcaatatcagcagcgttagggatgagtttggcggcacgattacttggcgaaaatcgtaccgtggcagctgtgattggcgatggtgcgatgacaggcggtatggcatttgaggcgatgaatgatgctgtccaacaaaatgccgatttactggttgtcttaaatgataatgacatgtcaatctcagcggcaattggtggtttttcacgccatttggcaaagctatggcagcgtggacttgccatggatattgataagcatggtaatattttgatggtcaaacgcaccatctcctctgatgaccgccgtattcgtcattatttgcatatggcaaacggtgcttttgaagatgtttcaagtcgcctaccgagtaaaatcagcgaaaaaatcagtgagctttttcatggcgttacctcttcacctttgccagataaaattgctgaaaaaattggcgataaattatttgcagataatctatttaaagccattggttttacttatcttgggccgtatgatgggcatgatttacccaaactcatccaagtgcttgagcgtgccaaacagttaaaaggtgcgatcttaattcatgtacacaccattaaaggtaagggttttttacctgccgaagctgatccgatcggctatcatgctatcggaaagttacccaaagcaggcaaaaatcaagcacccgcatctgcaccaaccgccaaaaaatattcacagatttttggtgattggttattgcattgggcaaatattgatgagcgcttggttgccatcacgccagctatggcggaaggttcaggtatggttgagtatgccaccaaataccccaagcgattttttgatgtggcgattgctgagcagcatgcggtaactttggcggcaggcatggcaacttcaggcaaaattaaacctgtggttgcgatttattctacttttttgcagcggggttatgatcagctgattcatgatgtcgccctacaaaatcttgatgttacctttgctattgaccgtgcaggtttggtcggtgaagatggtgcgactcatgctggggtttttgatttggcatttttacgctgtgtgcctaatgtcataatcgctgccccaagtgatgaacatgagtgccatcagttattgaacacttgttatcagtatgacggtgtggcagccgtacgctatcctcgtggtgttggcgtggggcgtaaggttgatatgacagatgagcattacccaattgggcgggccaatgtggtctggcagtcatcaaactttgatacaaaaagcaccaaaaaactggcagtattatcgttcggcactcgcctaaaagatgctctgaccgccgcccaaagactgtcagaaagtcaagcaatcgcttgtatcgtggtggatatgcgttgggttaagcctttggatgaggcacttattttaaggctgcttgagatgggtgtgacgcatattgctactgttgaagagcatcaaatcacaggcggtgcaggcagtgcggtgaatgaattcatcgtaagcctacaagcgttggttaagctgttaaatatcggtatcaaagatgcgttcattcatcatgccagccatgaagaacagctgttgtattgccgattggatactgatggtatttatcaatctttaagtaatttaatcatcaaaaactaaatccttgtcgggttggttgtgttttgtgtatttgttgccatgaccataattttcattggttttttggcagtttttggcgtataataaaaatcttttgcgtgatgagtgcaaattaactctttaagcagtttaatttaataaagcaggtgtagtatggaaccgatggttgtcatggcggcaaacgcagccaaaaaagtgggtcatgaaattttgcgagcacatcaaaatcgccatcgccttgatttggcggtagaatccaaggggcttgatggcttggttacccaaattgaccgttatgctgaagagctgacgattgctacactcaaagaaagctatcccaatcattcgtatttgggtgaagaatttggcttacaagagggtaagggtcatgatgctgattggtgttgggtgattgatccactagatggcacccaaaactttgtccatggcgtcccacatttttgtgtgtctatcgctgtccaaaaaaatggcgtcactgagcatggtgtgatttatgatcctgttcgagatgaaatgttttctgccagtcgtggtcgtggtgctgtcatgaatcagcgtcgcttgcaggtgagtgaacgcaagaccattgaaggcggactgtttacgacaggtcatccctatgagcgtatggtgggcgaagagcgagtcagctttgcccgtcagcattttgccagcttgcaagccatctgtgaaaatggtggtcaagtacgccgctttggttctgctgccttagatttgtgctatgttgcagcaggtcgctatgatggttattttgagatgtcgcttaagccttgggatatggcggcaggcgagctaattgtcaccgaagcgcgtggtgtggtggttgatcacaaaggtgcatcaaatgcgatgacaactggctctgtgtttgcttgtaatgtcaaattgctcaaaccattaatgcaattggtcgtaccgcgttgggaaaatgctttggtggctaaacgcctttgcatgtatcatggtcatatctagtaacgctcatttttgagcgttattttttattgggattgattaaatttaaggggattgtcttaaaattaataaagatgtgacaagatatgtcaaaaatgaaacaagtgtttacactttatgggcataaattggcaataattggttgtgtacatctgtaaacataagctatactaatctcaacaaatcaatcaaacaccaaagcaaatttataacagctgctggtgatagacataggatatgacaatgaatcagccaaaacgccaaaacattgaaatgaatattttatccaaaggcaccgaaaagccaatcaccaccgagatgatcactgctgtcctaaaaaaacttgccaaaggtcattgtgaatcattggcactaactgcttaaatgcataactaaattatttaatcgtttattatttaatcatttctccaaaacttgttggctttcaagcagacataccgcctttaatggcggtttgtttgttttggctaaaatatcatcgagattgatatcataaacggtcttagctgaccgatttatcaagacttaggatatgagttgttattgttatcaagtattgtgtataaaaaagggcttgcaaacttacaaacccttttttatgaattgaaaatggtaggcccagcaggacttgaacctgcgaccaaaggattatgagtcctctgctctaaccaactgagctatgagcccttaaaaaaatatctaataaatacaataacttattaattgcatatattatataacagttttaaaattactacaaatctttttagtagacatatagcagaccgattaaaattattgtaatatatcgttgtttattacaataagttgctattatacactatgacaacaaaaagtgaaagagttaagcttacaaaaagttttattgagtcgttgcctttgcagcctgccattttccgagatagcgagcttatcggttttgctctgcgtgttcaaaagacttacaaaacttatattgtagaaaaaaaggtcaaagggcgagcggtacggcacacgcttggcattgtcggtcagatgacattagcacaagcacgacaaaaagccagcgagactttggcactcatggggcagggtataaacccaaatgagcaaaagcgacaagagcaaaaagcttatgagcaagagcgagagctacaccgatatcaccccaccttatcagacgcttacacagcgtttaaagccgaacgcagtttaaagccaaacactttaagagattatgataaagttatgggtgtgtatttagcaacatggcaagtgtacaaactcggcgatattaaccgaaaaatgatacaagaaaaacataaagagctgactaagattagtcctgctcaagcgaacatggtaatgcgtgtatttcgtgcggtttataattttgcggtggaacattatctagacgatgatgaaaaccccattttatccagcattgccccaactcgtacattaaccgccaaaaaatcatggaacaatattaaacgcagaaaaacttacattaatgaagataaaatgcccgattgggtaagggcggttattgagtttgatgggcgtgggcagagtcgtgatactaataaagagtttattttaacgctgatattgacaggttttcgtcgtgctgaatgtgaaagcatcgcatggtcggctgtagatttacgctatgggtttattacatcaattgaccccaaaaatggtgaagtacacagcctaccgatgggtgatgtactgtgggcgataatgaaaaaacgccaccgccaacgcattaatgactgggtgtttgaatctgccaaatcaaagagcggacatattgaaaatatctctaaagtgcgtgaaaaaatcaatgcccaatgcggtattcaattcacattccacgacttacggcggacattcggctcaatcgctgaaaacttggactatggtcaatatacaataaaacggctactcaaccataaaagtgctggtaatagcgatgtaacagcaggatatgttcaagttagcgacaaaaaactacgccaagcgatgaatgatattgaaatgacggtactgggggaatggcgtgatatactattgcaagaatataacaaaaaagccctatgacagggcttttttataatcaggatgggaggtgtggggaactttaacagactgattgataaagttcaaaacatctgatttttggtaatatacgacttttttgctttgtttaataaagggtatgccgtcaccattgcaccgcttggcttgtagccatgacaaagaacggttaagtacaacggcaatcgttaatggcggaaaaatagcatcatcactcgctgaccaaaaacggtcagattcggcttttgcttgttcgggtgttaagttttttagtctatttatcatctcacaatctcctaattgttactttaattttaccttgcgacagtgatgcaatcttagcaaagctggcttttgataaatctaaagtcgtgccatatttaccaaaaccgccacggtcattcacacggcaaatcactgatttatcattggcggtgttggtaacttttaaccgtgtgccaaatttatggctattgctggcacaggtcatggcgttttggtcaaatctctcaccacttgctgttttacgaccgtggaatttatcgccatagtaggtcgcataattggcttgtgacgcagtggcaagcagggcgatggctagaaataggtatttcattgtgattgctcgctcacttgttcagctatcaattttcgtttgttcattgttagtttgctttaagctgctcatattcatctaatcctccaaaaaccagcagtgatagcaaagccaaaacaaataataaaagatatagaagcgagaataattgtacccacaaggtacacagataaagctgacatagtcagcataactaatgcacccaagagtgaatacagtaaggcactagtaaaatttgaaacattaaatcgcatattacttactcatcttctagtactggcttgccatctatataatctacaatgattttacctgtgtgagtatctaaaggtattacttcatcataataatagttatcatactcaccaaagaacaccttgtcatcataacctctgataatatctttaactacacccttaggcagtaagatgctacagataacataagcatagccatcatcaagcatttttttaatggttgtaacagatgttggtattggctcttcaaactgaatatgtggatataaattcgttaaaagctcatagttaagctgagttgcatgaaagatactttgagccaaatgatgttgaaatttttttccatttggctcaaagaaattacctaaacccaaatctacactaacagtgtcttcaccatgctttagcagtgttagaattttatctgacataaggggatagtaaactttatcgccaactttaaatgttgtttgtttaatcatgtcataatctccttcatcttatgccgcctacttgagataaaatttaccgtctttttccaccgccaccagtgccaaaactctcatggcggttttgtaggacatgcctatgcaggtttgtacattagcaatagttaagcctgcggattttttgtaagtaatttaatcacctgcatacaaaattcattaaaaataagctcttgttgctgctggcaaaaaagacgagcttccgtgtcaaataattttctatccatcacacacccctttgtttttcataaatattaaaaataaacgccatagcatccgccaaaaacaggcgttggcttggcagtacttgcttatcatcaatctcatgcacatggcccaatagccacaccagatagttatagacagcaaaaagggaggatagattaatctcgccaccgctcgccaaactacgctcataagtcaaaagatgacaaatggcgttatttttggcgtcaagggcgtgagcggtgctaaattttagtgtcataagcacacgatgaatttttgtgagtgttaattttttatttttaacaagcccatttttatcatttacctgcccctgacagcttttgtcagcactcataatctaccccttggtgcagcgtacagcgtagccgtcagcttgccatgacagacactcttgataatctatctcagcttggcggtcaaaagcatcatcaatggctttgctacacgcaaaaggcagtgatgccaacatgatgataaaaataaactttgggataaggtcgcttgatgttggtttggcaatcataattcactccatttgttgttatgttgtggattataggctaacctttaaaggttgtcaataggttcaaaaggttttataatagattaacctattaaaaatttgtaaatttttgttaaatataggatttctttaggcaataaaaaaccgccacaaggggcggttaatatgatttcttttggagtattagatggattattcaaatcttgttattagcttggtattatcagtcatcatcgcactgattgtgtccatagcttttcattttatcaccactttgattatcaaaagttggtttaatcaatttttgaatactcagcatcaaatgaataaacactttgtagaagtcatcaaggaagatattagacgaaagttacatggtgggtaggcaaacttcgcaaagattgcgaccaaaggcagttagtctaattatacctttttgtaagtccgcctgccaacttgccatcagttctctctcagctatcagtctttgacgccaatcatcatcgattgggttaccagcttgatcaacaagaggtgcatcacattgatttaattctactaagtcttgtcttgcttgtttagctgcatcagaaacttcttttttaagatttagataaccagcatgagcctgatgatgctgatatttgctgctgtcgtcaaaccaattctcataagatatattcaccaaacctagtcttgctaaattttcaatagaaacttgttgcagttcttgactgggattttctggattgcccaaccatacatcatgagttatgatctgataggtaccattactgccaattgttatctttctagtgcagatagtttcatctttgagtgtgtataaataatacagattttttgcatccagcggactgagcattttaatgatttcaacaaaggcgtgatgtgttttatgactgcgagttttatccattgatgttgcaatcagccgagcaaacatttggcgaatctcaccctcatccatgtagaatttactcgcttccagggcaggacctgcgatgctagtttttggcggctgaatattctcgggtgtaatgatattaatctcgttggttaattcattgcgaaattcgcccatattccttaaatgttcgactcggattttttcagtattcaagtcccacttataaccgaatgtacaataccatattcccattacaatataaaaagcatctttggcatggacggcgatgacagcactgattgtggcaaccgccaaatcttgaattggattatcactcatgatttattctccttataaaatctaaccactccgatacaccacacgcccaatgatcacaaggctctcgccgtccgtctcattgacgattttggcaggataggcagggttgtcgctggcaagcctcagcaccccaccaccctctttatagatacgcttgatgagcaaatcaccgtcccaaaacaaggcatatacttcaccttctctcggctcggtatcagacacatctatccccaccgcatcgccctcttggatgtagtgtgccatgctgtcgcctttggcatagattatcttaaagtattttgggtcaagattgcgatatttaaaaaagctctggtcaaagggcaaagttttttttaagggttcaaattcaggatagccccgacccgacccacagcagaacgacacatcataaaaattcacccacacctgctcacgccacggctctatctcatcatacgtgatgccatttggtatagatgccaccagctcatcaacttgggcttgagtggatagcatttctccttcgccagtcaaaagccattctggattagctttcaaagcgttggcaatttgcactaagctacgactgctttgggttttaccattctctaagtcgccatagctcggttgcgacaaacccgccaactttgccacctgagcctgcgaatagcccaattctttacggcgttgtttcagtcttactgctaaactcataagaaccccttagtttaaacggtgcaataaggattttttattattataaaaggttatccttttatatttcaagcgataaaacaaaagccctcttgacaaataataggattgcctttaatattgtgtgcaaatttctaaggaaaacctatttttatgaaagaagtcttacttgaacttattgccgaatatggcagtcaggagaaattggctcgtgcgattggcgtgaaacaaggcacgattacaggctggatacatggcaaacacggtatcaatgagcttaatgcctcacgcattgagaaaatcacaaacggcaaagtcaaagccattgacctttgcccacgccttgccgaaatagaaaaaatgaaagcccctagctgtaactaggggcaaaaatgcttagcacaataagcgagattgttaaataaccccctttattatatgacgaacctaccccaaatacaaccccacgacacacttacccaagcggtaaacgctcgtcaggacgcgcatttttgcaaaataa

SEQ ID NO: 16 - DNA, 22407 bp, Moraxella catarrhalis
ccctgaattgtcaggatatcattatcacactggcgtggtatttaatgcctatttgggtaatagaaccacacagactcaagctttggtacgaggcggtcgctttgatggcatctcaactcacagcgtggcaaggggtgcaactggttttagtatggatattaatcgcttgcttgaatttgtagagcttgaagaagataccgtgattttggtggattatcacgatttacaaaatgctgatgcagacacaaaagctgatttggccacacaaattaaaaccttacaatctgaaggctgtattgtcattaagcccttgactgtagatgataagcctgaccagattgatggtattttgcattgggacaccgatcaagataagccgatttgggcggtgcgattagttggtgatgagtactaaatgtcaccgattgatgttgttgattgatttattgagtaacttttaaggatatattatgggtaagaatgttgtcgtgctgggtagtcagtggggtgatgaaggcaaaggcaaaattgtggatttgctgaccgaaaaagccacagcggtcgcccgctttcaaggtgggcataatgcaggtcatacactggttgttggcggtgaaaaaaccgttctgcatcttattccatcaggtattttgcgtgagggtgtcacttgtttcattggcaacggggttgttttatctcctgaagcactacttaaggaaatgaatggtttaatcgaaaaaggtgtgcctgtgcgtgagcgtttgcgaatctcacctgcatgtccgcttatcatgccttatcataccgcacttgaccaagctcgtgaaatcaaacgaggcagtggcaaaattggcacaacaggtcgtggtattgggcctgcttatgaagataaagtctcacgccgtgcgctcaaagttgctgatttattccgtgcagatttaccagaaaaactagaaaacttacttgaatatcataactttgcacttaccgaatattataaggtagacgccattgattttgataccacgctcaaactgtgccaagaatgggcatctgatcttaaggatttggtcattgatgtgaccgatgcactagagatccgtcgccaaaatggtgaaaatttgatgtttgagggtgctcaagggacgctacttgatattgaccatggtacttacccatttgttaccagctcaaatacaacagcaggcggcgtatctacaggtacaggcttaggccctttatatttagactatgtgttaggtattaccaaagcttataccactcgtgtcggctcaggaccatttccaacagagctgtttgatgatgttggtgctcacttagcaaaagttgggcatgaatttggtgcaacaacaggccgagctcgccgctgtggttggtttgatgcggtcagcttacgccgtgcggttgtattaaactcaatgagcggaatttgtttgactaagcttgatgttttagatggcttagatgagattaatatttgcaccagctatgaagtaccagaaggtgaatgtgctggtgcttatgatgctgaatattatgaaaaagtggtaccaaaatatgaaaccctaccaggttggagcgaatcgacgattggcgtgaccaactttgattcactgcctgccaatgctcaagtatatatcaaacgcattgaggcgcttgtcggttgccctgttgatatcatctcaacaggccctgatcgtgatgaaaccattgtgttgcgtgatccttatgatgcttaagtgagtgtgattttaccaatgatcgcatcggataaaagttggtattaaccctgataattaacttttatttaattatcttatcagtgttatgtgaaaataactttttggcatgacttagttatttgattatcaaatatatcaacgaacccaatcttgacttgatacagttatgattgggttttttattgttaaaaaattaatttatctatttatttttgataagttatcgtaaataccgataaataatccaaaaaatcccactttatcttagcctgatcttttgatgaaatggtagggtaattggcacggtcatcatgttagccataacttttatgatgattgtctcttaaggtgtcttaaattgatcaaagtgtgcctgcctttggcattttttatataaaactgacttaaaattgtacattgttatcaattttcaatcatgatgatcaaaggtaacgacgctttaaatatattcttattatcatgctggataatagtgttaatattcattcacaggagggttgaatgtctatcactcaaggtgtgcatcatgtggcatatcgttgcaaggatgccaaagaaacggttgcatggtatcaaaagcatctgaatatgggctttgttttggcaattgctgaggataaagtaccatcaacgggtgaacctgatccatatatgcatatttttttggatgcaggcggtggtaatatcttagcattttttgagcttccaaccaagcctgcgatgggacgagatgaaaatacgcccatatggactcaacatttagcactcaaagttgatagcgaagagaccttaagcgccaccaagcaaaagctgattgatgcaggcttggaagttttgggacctgtaaatcatacgctgtttaagagcatttatttttttgacccaaatggtcatcgtgttgagcttgcctgcgatatcgcaaccgatcagataaccgtgctttagataaagtaaaatgggatatgctcaatgaatgggcacaaacaaaaaaagcacccaaacacgcacaatgggtacatgatggcagtttggttgtggttagccgtgacttaagccaatatcgtaaagttgaggatattgcaccaacgctgcaagctgctttagatgattgggaagtggtatcgcccaagctacaagcggtctatcaggatttaaatgacaagtaatggattgccttttgatcaaacacaatgccattcgcccttaccaagagcataccaatgggcagatggttcggcttatttaaatcatgttgaattggttcgcaaagcacggaattcagaggtacccgaatctttttatgatgatccattgatgtatcaaggcggttctgatggctttattgggccacgagatgacattgtggcatcagaggcatggggtattgacatggaggcggaagttgcggttattacaggtaaagttagtttgggtagcacatcaaaacaagctgccgaacaaatccgattggtgatgctggtgaatgatgtttctttaagaaatcttatcccatcggagcttgccaagggatttggcttttttcaaagtaagcctgcttctgcatttagcccagttgctgtgacacctgatgaaataacagcttgggataatcaagctgccaaattgtacctacccattcaagtccatctaaacggtgagctttttggccgccctaatgctggtgaggatatgacctttggatttgggcaattgattgcccatgctgccaaaactcgtcatttggcagtaggcactatcattggttcaggcactgtgtcaaataagcaagacagcctttgggggtcgagcgttgagcatggtggagtgggctattgttgtttggcagagcttcgtatgtatgaggcgattgaaggcaaacagcaaacgccgtttatgcaagatggtgatgtggtacggattgaaatgtttgatgaaacaggtgaaagtatttttggcacaattgaaaataccgtaaaagcaatataagcatcatgtttggcatttaactgtctaataaaaacccaaattcaaaacgatgaacttgggttttatcatcttggattattaaggtattgtttaaggtgaagtaatcatcttaaaataatacccttggttacccaaaaatctgcttaagtgccactttataaaattcaaaggcttctgttgccccttgaatggctgtatcttgctcatctttactaagattgagctggtttaaagattcacgaaatgccttccaatgcttaccacgcccatcaggatgcgcatctaaatggcttgcaccaaaattttcatcaaagcctaatttttcttttgcgtctttaaataaaaaggctgcaccaatattagaaccttcggcacaataaagccagccgatggctttggcacccattggtgctggtaattttgccttaaaggtatttggctgttgttctaggtcttttaaatcatttaaaacggcatcataatgcgtcattgatgctaagttttcaatggattggttcaatgctgggtctttataaatggggtcaacaattttatgaaaaacagattgtagatttaaaaacttaatataattttcgacactgtcaaaaggtctaactgacatgaccgtctcatcgacgctgtcgtgtatgttgcgagtatcttctttgagacgctcggcgaaagtaagttgtgtcatagcattactccagtttatgactttggttgatgactaaaatggcttaagcgactaaatacgccccatctgtcactggatacttctagtctaacccaacaactgtaaggttatacaccaaatcactgccaactcttaaaaagatggctaaaagatatcaaataagtaatcttaacacaagtgataattattatcatttttatgaaataataaacaaacagttgctaaattgcaacttatttttgatcaatttataattcatatttacaattaattaatatttacaattaattaagatttgatgataatagcttggtggttttaaccaatatcaacattaatcagccatcaaaaagaaaaaaccaatgtcattagagtgctggtaaaagataagcattgagcaaatttattatgaatctgaatttgggctaacttaaatcttttaacgcccattgctctttgtctttgaacatacattcatcaaataccacacaagcaccacatttgggctggcgtgctgtacaagtataacgcccatgtaatatcaaataatgatgtgcatccaccaaaaacttggcaggaatacgcttcattaaggctttttcaacagcaaggacggttttacctgtggccaatcctgtccgattacccacacgaaaaatatgtgtatctactgccatgacaggctcaccaaacgcggtatttagcaccacattggcggtctttctgcccacgcctgctaaagcttctaattcatctcgagtgcggggtacttggccattgtgtttggtgatgaggtcttggcaggttttgatgacattggcagctttagagttatacagtccaatagagctaatataactttttaggttatctaatcccaaatccaaaatagctttgggggtgttggcaactttaaataatttatcggtggcaatattgacacttttatcggtggcttgagctgatagcatgacagcaatcagtagctcaaattctgaagtatagtgaagttcggtgacaggttctttgatatgcttggcaagtttttgaaaaaataccaaacgcttgttggcattcatggagcgtgagggcggcgtgttagccgttttggtcgtggttaatttgggtttggttgtcatagtttatagtttatagtttgtggcatactggtttagtttttagctgttcggttgtctttgtcgtctttatcatcttgtacccagctttcaagacgtttgacgattttgccaaacaatgtattacgcttatactcgccatgcttatttttatcatcaatgagcatgcctgacaaaagggcaagggcgtcggtaatgtggtcgatggcataaatatgaaattgttcatctttaacagcctgtacgatgtcatcacgcagcatcagttgggcaatattagcgcgtggtaatattaccccttgattgccatcaagccctttatcacggcaagcatcaaaaaatccagcaatttttgcattcacaccaccgaccgcttgagcttgccctaattgattcattgaacctgtgatggcaagattttgggcaatgggaatattggctaaagccgataaaagggcacacgcttcggcaagcgttgcactatcgccatcaatttgcccatagctttgctcaaatgctaaagacgcactgaaatttaattcatgaaattcgctaaataaggcacgcagaaaactggacatgatgagcatgcctttggcgtgtaagctaccaccaagctcaacatctcgttcaatgtctaaaatctcaccttgaccaaagttgggctgaatcaaagcggtcaagcgtgcaggtagcccaaattcactatcagcatagctgatgatggttaatgcgttgatttgcccaaccgcccagcctttggtgcagataatttgctgaccgtttaaaatctcctgccaatacaaatcctttaaatacccctttcgttcagtgatgtcatcaagtgcggtttgtacatgcttggcggtgactattttgttattttcaagggtagcgattcgtgcagattcaaccaataatcctgacaagcgatcggcgtgtaagtccagcttatttttatcatcgctaagcttggataattcatcaataattacagcaaatgcggtattatcaaaattgggcaactgatggcttttaatcatatccaccatttttaataccatgccatattcactacagtcatctcgttgaatgtcatcatgaaaatcggcacgaactttaaagaccgaattaaattcaggttcaaattctagcaattcataatataaatcagcttcaccaagtaagatgactttgacatccaatgccacgctatcgggctcaagcgataggctgcctgtcaaagtgagcatctgttcaagacttgagattttgatttgttttgattgcaaagcacgctttaaaccttgccatgcatagggatgttcaagtaggctttgggcttctaataaaagatagccgccatttgctttgtgtaatgcaccagctcgaatcatgctaacatctgttaagacagtaccaagctcggtggtatattcaatatgcccaagtaagtttagatgtgttggcaaatcttcaaatacaatcggcgcaccagctgatggctgatggctgaccaagatattgacgacatatcggcttggtacttgtgataaactggtggcgataaaattgtcatcatcttcattgatgatatgggtaatgtttttgaccatatcatcttgaatcgccatgagatgacggatggcttttgggtggttctcaaagtttgccatcacagcgttaaacatgggttcaagtacttttttggcagtactttgatgtagctcatcaagtgcctcatgcgtgctgtcttcaagctcactaagctcaatttgtgcctctaaaagctgtttttgaagctgggcgagctttttggtatctataggtttgctgtcatcaattgccacaaaatgcacacgctcatcacctgtggtctttagtaccaaattatgttgtttggcatcagcattaatagcgtcaaatcgtttgttttgttgtaggggtatggctgattttatcagttcaatgtggttttggtgagtatctccaagcagtttggcgaccagctttttttttggcattttgccaaagtttatggactttttgctgaaaaataattgccataccagcaggaaaatcaatggcaatgggtcggcgtatgtcttcaaaatgatgtacatatacccaatcattcggtgttggcatatgcttggcacgctcagccaaaaggcgtgtgacgagtgtacgcttgcccaacccattttcaccgactgcaaacacatgatagccattggcgtgtatgtctaatgcggtgtttaaggctttgatggcacggctttgaccaaatgcaatatcaggtttgggcagatgcagacggctagatttgggcagatgattgggatcggtgtagcgttttaagtcgcaagcttgtaatcggtagttgttttttaaacgatgatatgcattatctttcataaaatcaaaatcagcttcgtctgctatcctttgtgcaaaatagtaaaatatgaacgaaatgcccaaaaaacgcagtgggttggttaaaaagggtattttagcagattaaagcatgataaaatagctttgctgtgtataaacttttatttttactgccttatttggcaatcttgtgttgattggttaaattgattaagaacgatgatatgacgcccaaattttccaaaatctcccataaatttcaacgcttcgccgctgccattgatgaggcagcccaatcgcttggattgacgattaccgatgtgcaaaatatgcagattttacggtatttagacggccttttattgtggggtaaagcgtacaatctaaccgctatcacagaccctgatgaggctttggtgaagcatatttttgattgtatggcgattatacccatgctgccgtttgtcacgcaaccaaacaaatctttgctagatattggtacaggtgcaggattgccatcggtaattttggcaattttaaagcctgattggcacattgatgctcttgatagcaatcaaaaaaaaatccgctttattcgccagattagcagtgagattggcttaaaaaatatcacgtcaattgcttctagaattgagcatcatcatgcccaaaaagcaggtgcgtacgatgtgattacttcacgggcatttgcgtcactgactgattttgttagccttgctacaccatgtttggcggatacaggtgttttgtatgccatgaaaggtaaaaatccgaccgctgaggagatggcagatttgcaagcttggcacatagatattgagcccatctgcgtacccaaattagatgacgatcgatgtgtggtttacctaacaaagcagtaattttttaatcatttttattggatatgttttcttttaaggttttattatggaaataattgcaattgccaatcaaaaagggggtgttggcaagactacaacaacagtcaatttggcagcagcgttggcgataattgccaaaaaaagggtgctactgattgatttggactcccaaggcaatgccaccaccagtgttggtctggataaaaatgccttagaatatacaatggcagatgtgctacttgatggcgtgtctttacaagatgccatcttatctaccgatattggcttggatgtcattggtgccaaccgagatttggcaggtattgatgtatcacttgcaggcgtggcagacgcgccttttttacttaagcaggcgatggcagatgccaagatggcaggcaagcttgagtatgattatatcgtgatggattgtgcaccaagtcttagtatgattacggtgaatgccttttcggcaactgatggcgtgattattccgatgcagtgcgagtattatgcgcttgaaggtgtggcagatttgattgcgacgattgataagctaaaatccatcaatgaatctttgcatattcgtggtgtggtgcgtactttatttgattatcgtaacacattggcacaagatgtttctggtgagcttgaacgccattttggtgatttggtgtatcaaaccagtattccaagaaatgtgcgtttggcagaagcgcccagctttgggcaatcaatttttacttatgaaaaatcatccaaaggtgcaatcgcttatcataaacttatgaatgaagtgattgcacaaacgaaagccaaatcaaacggatagatagctatggcaaaaaaacgcagacttggggtcaaatacggtttggatacactcttaagcggcacaaaggtgagtcgccaagttgttgatgtgattgatgatgccaaaatggtgatggcagatgataatcaacctaacgataagccacaagcggtatcaagcaccgctgagtctgataccactcatcaaagtgctgatgataaggcggtgagtgttttggataacttacccaaatatcaacaaaaacagatcgctttgttttggcagtttggtttggctgagccgtgatactctgatttgacgcatgcgtcaatcataaattttaattgaattattaattgcagactggaaattttcatgattaaaaagcgtggattgggtatgaatcgtgggctagatgtgctgcttggcaacatctcagcagaaaaaaaaatcatcgcaggtgcccagtctttggtggcaagtgccgccagtgaacagaccgaaactaagcctacagcctcaaccaagactaccaaaatcaataaagcgaaagcagataaaaaagcaggtaacaataacccagctttggaagctggcatgggtgagaaagtagcacttgttcaaatcgccaccaatcgcctgcaatcaggcaaatatcagccacggcgtgatatgaacgaagaggcactcaatgagctatcactgtccatcaaacagcatggcgtgatgcagccgatcgtgattcgtccgcttttgtcagatgaggataagtctagtgatacggtaacgcacgagatcatcgctggtgagcgtcggtggcgagcggcgaaactggcggggcttgagaccattcctgccattgagcgggttttgtctgatgaggttgcgattgctttggcgttgattgagaatattcagcgtgaggacttaaatgtcttagagcaagcagcggcattgcaacgatttcatactgagtttggtatgagtcatgcaatgattgcatccgtggttggtaaagcacgcaccactgtttcaaatttaatgcgattaaatcacctacacgatcaagtcaagcaatatatgatagatggtgtgatggatatgggacacgctcgtgcccttttatcactctcccaagagcaacagcccattatcgccaaaaaaattgttgatggcggcatgacagtgcgagatgctgaaaggctggtcaaatcaattttagatcccaatcctaagcttatcgttcagccaaatcatgaagttttggcactttctcagcagatatcggatgcactgggtgctaaggttaaattaaagcaaggcaaagatggcaagggcagtgtggagattttcttttatgaccatgatgagtttggcgagctggtcaatagactatgccaaatatcagattattgatcatcagacattaaaattagcagggcaatggtcatgaagaagcttgagttggcattgacgcaggcgtggcaaaaaaatgcagcttggctaaagctgttaacacctctatcggggctatatggtatggttatgcatgctagaaaatctttgtatcactcaggtaaatgcccaatttatcgggcggctgtacctgttcttgttattggtaatatcactgttggtggcagtggcaaaacgccattcattattgctttgactaaaattttacgcaaacaaggtatcagtgtcgctgtcatcagccgaggttatggtggtgacagcacacaaatgcccaaattggtcacgccaacaagtacgcccaatgaagtgggtgatgaaccttgcttaattgcccaaagtctgtattctgatggattttttttacctatggcagttgcgccaaatcgtggtcaagccattgatttattactacaaaattttcctgagacgacactgattatcagtgatgatgggctacagcattatgcactgcaccgtgatgaagagtggattgtggttgatgttgccagaggttttggtaatggtaagcttctgccacagggttttttaagagaacccattgaccgattacaagacgctttggtcctttatcatgataaagatatgaccaaatatcctaaaaaagcgatggcaatgagcctaaaagtagggcaaattgagccactgatgggcaatcataaaagccctgtgccatctgtaggtacatatgttcatgcggtcagcggtattgggcatcctaagcggttttttgacactttatcggatcaggggtttttggttattccgcatccttttggagatcatcatgattttagacttgaggatttggtggatttgatcaatcatcccatcattgtcaccagtaaagatgcggtaaaattgcgtcatttggcgacacaaactacccatgatatttttaatcatatttgggtgctgcctgtggagatggtattatctgatggcattattgagcagattaatcatttaattgttaagtatcaattaaattaaatgattggagttgttgggtatttagcttgaaaattctatctaacaatgcctgtatctttatctggtaggataagcataaaaatacaccaattcaatttttaaggatagctatgcaaaaaattcatctgattattccagctcgttatcaatccacccgtctaccaggcaagcctttattgcttttgcacgatcaaccgatgattctatggacagcaaaaaaagccttaaaagcaagttttgtagacaccgtctgtgtggccaccgatgacgatagagtctatcagacttgcgccgatgtaggcatacatgtcgtcatgactgacagcactcacccatctggaacggataggttggctcaagttgcaacggatttgggctttgatgatgatgatattattgtcaatatgcaaggtgatgaacctttggtaccaacggtgctacttgagcaagtgacgcagctgttgattgataatccagattgtgcgatggcaactttatgtgagccaatctatcatcaagaagaattttttcgcccctcagtggtcaaagtggtgatgaatcaggcaaagcatgccttatattttagtcgtgcaccaattccttatgaccgtgatggcttgttggatatgcctaatcatgcatttcgtcacttaggtttatatgcgtatcgtgtgcgtatgcttaagcagttcacaaactggactcaaggggtgtttgaaaaattagaaagtctagagcagcttcgggtacttgaaaatggtgagcgtatcgccattgatatcgcacaagttgcactgccagctggggtggacacacaagaggatttggacagactaaatgctatgcctatggatgagtttttaaagttttaggagtggcgatgaccacagtttattttattcgccatgctgaacccaattatgccaatcgtgatgagtttagccgagacttgaccccaaaaggcattgcccaaagcgagcggttgcttgatgtgtttaggggtattgatattgatgtgtttttttcaagcccttacaaacgggcggtggatacgatttatccgcttgccaacagtcgcaaaaaaaacattcatctaaaagagaagctttgtgaaaggcggattggcacttgggtggataattttgatgaatttagccaaaagcagtggcaagattttggatttcatctaaaaaatggtgaaagtttgcaccgtgtccagcaacgaaacattgctatgttgcatgaaattttgataaattatcccaatcagacgattgtcatcggcacgcacggtacggcattatctaccatcattaagtattatcaggcggattttggttatcaggattttaatgccaataagcacaaatttccgtggataatggcatttgaatttgacggtattatgctaaaacgctaccacgaaattagccatgaaatccacatggacgatacgccatgaacgagcaagaacagttaccctactttgctccattacttccttggcaaagacaggcttggcagcagctgacaggtcaattcattgagcagcgtatgccacatggcttacttgctgcaggtcaaaaaggcatcggtaagcgtgagtttgtttggcgatttgtggcgtatttactgtgtttggaaaaaaaccaatatggtgcgtgtggtcactgtcagagctgtcaatggttgcgtgctggaacgcatcctgatttattggtgctaccgcagggtgatagcatcaaaattgatgatattcgtttgctccaagaatacagtcaaaccaaagggcatggggtaaaagtcattgtgcttgatggggcagatacactgacactgggtgctgccaacgcatttttaaagacgcttgaagagcctcgagatggggtatttttgatactcattaccgaccatccttctaggcttttacccaccatcaaaagccgtgtacagacaatgcctttatcttatatagataaagtagaggcgattgattatctgagtgaatttatgtcacctgagctatcaaagcttttattagatatcagcgatggggcggtcttgcaggctaagagcttatcttctgccaaatggtttgatcagcgtacactttggttaaaaacctacaccgctctacaattatccaagcgtaccgccagtgccgctagtagttactggcaaaaaaccttaactttggctgaatttatcacgctatcaagagtcatgttaatggatttatggcgtgtgttcttggggataccaagcttacatcaagatatagatgtggtagcgttgttggctcaagttcagcttgactcttcaaaacttgaatcattactaagctgtattgatgatacgcagacagcttacgcccaaaatgtgcaagagactttgggctttgaccgcattttaattgagatggcaaaatgacaatcaccaccattaatacaagttatgggtcgatgattggcgatctaaattttaaaatacttgtcggtgaatgattgaaaatttgatcgtagtgttatgatagtatcaaaaaaggctttggctaataatctatgagccaaagccttttttgatactaattcttggtaggttttattagcttagtaaacttactttttattgaattttaccagcgaattggcgtaatgtgtggctgattggctttgagatgctcataagtacccttaaccaaaatatcagaatttaccgtactgatattggtatgaccacaaaatgccatcgtgacatcacattctttatagataatctccagcgcacgacgcacaccatcttcaccataagcacccaagccgtacaaaaatgaacgcccaatcatcgtaccttttgcccccaaggcgatggcttttagtacatcttgacccgagcgaataccactatctagccaaacttcacagttagaattttcagcttgagatgcctgtacgcagtcagtcaaagaagcaatagagcttggcgcaccatcaagctgacgacccccatggtttgaaattaccatcgcatcagcaccaaagcgtgctgccatgatggcatcttcaggttccataatgccctttaaaatcaaaggaccgccccacatatctttaatgcgtgccacatcatcccagctaagaccagggtcaaattgctctgctgtccaagctgataaactggatagatcagacacatttttggcatgacctgcgatatttctgaaagtatggcgttttgtgccaagcatattgtagcaccattcaggcttggtcattaagtttaagatattttttagtgtcggttttgggggtgctgatagtccatttttaatgtctttatgacgctgacctaagacttgtaaatccgccgttaaaatcagtgctgaacaatttgcagccttggcacgcttgattagattttccataaattctttatcacgcatgacatacagctgaaaccaaaatggtttggtggtattttcggcaacatcttcgatcgagcaaattgacatggtagatagtgaaaatggaataccaaatttctcagcggcacgcgctgcatgaatctctccatctgcccacatcatgccagtaaatccagtcggtgcgattgccacaggcatactgacatcttgaccaatcatttgtgtggcaagcgatcgattatccatatcaacaaggacacgctgacgtaacttaatgcgatcaaagtccgtttcattattacggtaagtggtttgtgtccatgaacctgaatccacataatcatagaacattcgtggtactttacgctcagcgatacgacgcaaatcttcaatttcggtaattttacttaaatcagccatggtaatttctcgcttaattttttgagtatttaatcgttgatatcatgtttttgggtaatttttagccatcaatgggtattttacttggttttatcttaaatcggcaagtaaaaactaaaatcaaatgcttatttttggcttagatggcataaataacccaaccttaagattgggttagtttaatgagtggtaaaatgttgtctttgggggcatgctaggctttattacccaccttgctcatgataaataagaacaatattggccagatgacagcacccacccaataagttgggttaaatataatcgccataccaattaaacctgcttgaatcacataataggacatggcaattaaagttttacgaatgacataaccttcacgattgaccaaaccaacaacagcacatgccgcaacaacattatgaaccgatatcatattgcccgctgcaccgcccaccgcttgcaaggaaacaactttagcggcatccataacacctaagccgatttgggttgctgtcccccattgaaaatgcgaaaacatcatgttagaaaccgtgttagagccagcaataaacgcgccaagactgccaatccaaggtgaaaccaaaggccacatgccctcaaatgcttgtgctgctgaggtggccaatacttttggcatggcaagaatctgtacagcagcatctggcgatgtgcctgaattgataaatacctgcaccatcggcaccgaaaatagtaacgcaggtgcagcagcgagcatggttttgcctgactctgaccagctttttttgaccatattgcctttcatgccaaaaataaaaatacacaaaattgacaccaataaaagcacgccaccaggagaataaagcaactgggttttattggtgatatttgtgcccaaaatgttggcaaaaacgatagaaaccgcatcactggtgagccatgcctttaatggtgcaatcgtccgtgtgatgattaaaatggtaatgatgagtagatagggtgaaaacgcacgtatgaccgaaaattttggagagatatcgctggttgaatcggtgatggtaaattcactgacccattctttctcccagctttctcgtggaccaaagtcaaaggtttgttttggggttaaaaacccacgcttggcagcaggaataaccaaggataaaccaacgaccgctcccacaatagatggtagctcagggccgataaacttagcggtcaaggcataaggaatggtaaacgccaagcctgcaaaaatcgcaaagggcgccacttttagaccttcggtaaatgagcgtttttgaccaaaaaatagtgtcaaaaatccgcacaatattaacggaattaaaaatccgaccataccatgaatcatgcccacattgcctgagatattgaaaatataggcaggtaaatccataccaatatttgccagtgcttgagcaaggtcgtctttattttcaagacctgaattgacaccaatcaaaagtggcgtaccaacggcaccataagatacaggtgtggactgaatgattaaaactgccatcacacacgccatcgcaggaaaccccaacgcaagcaggagcggtgctgccaccgccgaaggcgtaccccagcctgttgagccttcgattaaacagccaaatagccatgccacgataatcatttgaactcggcggtctggagagatatccataaagccttgacgaatggcattaattgcaccgctgtattttaaggtatttaaaatcaaaatggcagaaaaaacgatgaataaaacattcaccgcagttagtacgccatggatggttgcagcagcaacttggttaccgctggtttgccaaacaaaatatgacaaagcagccgttgcaaggtacgccaagctcatggcatatttagcgggtagtcgcatcaccaccaataataaaaagacaataataatcggcactatcgccaaaaaggtaaacatgctcactccttgtttgcataattttaagccaacagcagccgtatgccaaaaatggcttaagcgtctgtctaagaagaaaggtaaaccaatcaagatttaggcttgggttatctatgttatgaattttttatttacagataaaaacaaaaagtatgttatattttacctaaaattttacataatggctacagttttaaatgaaaataataattgttcaattttaaaaattcaatgccaaaaattaatgacttaaaatctacaataaagataatctgctttttgattgggggtagggtatggatattttttatcgtattttgctatcttgggatttggcgatgtgagcatgaatacgatgtcatttagagcgtaaaatagcagtcatagcaccctaaataactttataattgataatcaataataacaggtgcatggtcgctaaaccaagaatctttatagacccaagcgttcaaggtgcgttttttccaatcaggtgagcaggcgtgataatcgatacgccaccccacatttttggcacgggcttgaccacgatttgaccaccaggaataaatatcagcatccttacgaaccactctgaatgtatcaacatagccaagttcgtcatagatgtgatcaagccaagctcgctcatgtggcaggcagcctgatgctttttgattacccgaccagtttttgatgtcaatgcgtttatgcacaatattataatcaccgcagacgatgagtgatttattctcatctcgccactgtttaagaatgtggcggtatttttctaaaaaaagatcttttctggcttgagcttcttcgcctgatgagccagaaggtaggtataaagaagcaatatacactggatggtcgatgccttgggcggacaaatcaaactgtgcgcagataaatcgcccctgactgtcggcaagatcaaagcccaagccatctaccaccgacacaaaaggtaggcggctataaatagcaacgccagcatagcctgctttttgggcagcaaatagatgcgtatgccagcccctttgggcgaaatttatccgtccattgttcgtgagtgatgcgtgattcttggatacagaccacatcggcattgctgacagccagccactcaaagaatccttttttttcagccgcacgcaagccattgacattaatagaaacgacacgaagcacttgattggcagtttgatagattgacttggatggtacaatgtcatttggcttaacagcgacaacctgagatttgggtgttttttgcatacttttggtggtcaaagtggtagcttgtttgggcaagatagtacctaatgtatcttcttttggattgatttgagacctagtctggctattattgagaatagattttggcgtattgcgaactttttgggtcatagtcgtacttaatatcaggattaataaggacaagatacccacctaagtggggtgttatatattggcaggttcatccaataaagtttcttcgctggatttccagttataagcaccatacagcaccatttgcatttggcgtgtgcagcggtgcaacatttgctgttttttggtgtccagctcacaagttgataatcgttcttcttcatccaaaaaaatcggcatatgcgtcaaatccagccactcaataatccatgaaaaagacaaattcacacccgtttctgctaataaataacggtcatagctattgatatgctcaaaagcaggctgtaataccaaatcagcactcataattttggcaaaggtattgatttgttcattgatggcacggcgaaccgcttctgagccaccaaaccgttcactggcgataaattgccaatagcgaggctgggcatcgactgccttaaaaaagagctgaacacttttggcaatttggcggtcaaaactgcgtttacgcccaagttgcatatgctctctgagcgtggcaagtgcaccaccaagttcatcttcaaccaatgctttaccaagactttccatgtcatcaaaatggcgataaaaggcggttggcacaacaccaacctctcgtgttacctgacgcaagctaattgagctataaccttgaccgctcatacataaatcaagcacggcattaaaaaatgcttggcgagtttgacgctttttttgttcacggttggttgttcttgcgatgctcatagttcgtccagtgataaacttaaaggttgagtgaataactgtatattatggataaaaaccttgccagttgcaagtcattcaaaaaagcttgctgaaatttttaaaatcaatgcttttaatatgtattatggtgatgattttaagatcataaataaaaatcactcatttaaagcagtgagtgatttaaaatgatttatattaagtattaaaatggccgattaactggctttgacgcagtcaagcaacacttgattggtatcaccagttacgacagccttgttaccatcaatggtgagtatggttttttggttatcagcaaatccatgattgctggtgtattgatttttattactgggatcttgattaaaatcatactcaatgccatcatgatttaggtgagcttcaatttcaccttcatgattatgaacgacaatatgaactgtctgatcgccacattgatacgcatcgccatcagtgtggatgtgcatatgacctgcatggtcatcatgatgctcatgtgcgtgagtatgctcgtcttgcatggttgcatgctctgctgagggatttgcttggctggactcatcggcaggcttgctacaagcggtcaaagtcaaagctgccaccacagaagctaaaagtaatttttggttcatagttatcctttaaaacgaaatgagtatcattaaaaatattgaccatgataatatagcaaaaccaaccaacaatttcaaatcaagtcaaaatttttatgagatattgagggacttaatgccacccattaataaaatcagccaagcataacttggctgacacaatttgacatattgattatacattaaatctaaaatgcatcacatcgccatcttgaacaatataggttttgccttctaaacgagacttaccagcggcagcggcacctttttcaccgccgtattcaataaaatcatcatagccgataacttcagcacgaataaagccacgctcaaagtcagtatgaatcacgccagcagcttctggagcggttgctccgacaggtactgtccaagcacgcacctctttgacgcctgcagtaaagtaagtttgtaggtttaataattcatagcctgcacgaatgacacggtcaagacctgcttcactcatgcccatgccctccaaaaactctgctttttcttcttcatcaagctgggcgatttcagcttcaatttgattacataaggcaacgacgatggcattttcattgttagcaaattcacgcaccgcatctaaatgtggattattgtcaaatccatcttctgccacattcgcaatatacatgacgggttttaaggtgataagaccatagcttttaatcagctttttttcatcggcatctaagtccgccaaccgcgcaggcttgccatcagcaagtaaaggttcaattttttggaagacccctagagcagcttgagcatctttatcaccgcctttggcttttttatttaggtttgtaatggcacgagtgaccgcctccaaatccgctaaagcaagctctgtattgatggtttcaatatcagataacggattgacccgcccatcaacatggataacattgtcatcatcaaaacagcgtaccacatgggcgatggcgtcagtttcacggatattggctaaaaattggttgcccataccctcgcctttagaagcgcctgccacaagacctgcaatatctacaaactccatactggttggaatggtgcgttcaggattgacaatagctgccagtgcttttaagcgtgggtctgggacagggacaatgccagtatttgggtctttggtacaaaacggaaaattctcagcagcgatacctgctttggtgagtgcattaaataaggtggatttaccaacatttggtaagccgacaataccacaattaaaacccataataaattctcgtatgttgtgtgaaattttgtcattataccaaaatttatcaaattaaggtatcaaaaaagacgaatttgtaagctaaaaccgtcagacaacttatttagaatgatttgataagttcataagccagcggtaaaaatttcaccataaactgatttaaaaagatgcaagttgttggaaaaattgttataatcaatcacgattttactgtcacttaacctagcataaggaaaaactatggctatcgaacgcactttatctatcatcaagccagatgc

SEQ ID NO: 17 - DNA, 23210 bp, Moraxella catarrhalis
  unsure 28: a or g or c or t, unknown, or other
ctatttatctatatagccagcttatgangatagataaccagcaagccttggcatagcacgctttattcttgtgtcaatgtgttcgctcaagaattaacattgccaagctttaaatattgatttataattcgggcatatcacttgttttagacttaaaaattttgtcggaaagacggtaagggaaatttcatgtcaaacttttattgtacccatttatcttctcgaataactccagaaattcaagcagttgagttccttgttgccctaaatagtttggcaaccagacaggtttcggtgacatttttgggcgagcgtatgacattggatgtggtggcattgatagcactgcatgataaatatggtgtggcattggctgatactttggcgtttgccaaggctttggttgatcatggtttagaaaatacatcgcttgatattgtacaagcaatcaaagcacaaaagtcagccaatgagtttgatagcggtagtcaaatcaaagcgactgatgtggtattgtatggatttggccgcattggccgcattttggcacgcttattgatgagtcgccctgcgtcagagtcaggcttacagcttaaggccattgtcgtgcgtccagcgggtgagggtgatttggctaagcgtgcatcgctattagaacgagattcggtacatggttggtttaatggctctgtacaagttgatgccacaaataatggtattattgtcaatggtcgctttatcaaggtaatttatgcgtctgacccatcagaggtggattatacagcacatgatatcaatgatgcgattatcatcgataatacaggcaaatggaaagatgaagcggggcttggtaaacatttggcatcaaaaggtgtaaaaaaagtgttactaacagcacctgccaaaggcgaaattaagaatattgtctatggcgtcaatcacgataccattggtagcgataccattgtatcagcggccagctgtaccaccaatgccatcacaccaacactgaaagttttacatgatgaatatggtattgttcatggtcatatggagaccattcacgcattcaccaatgaccaaaatttggtagataatcaccataaagctgaccgccgtggtcgtgctgcaccactgaatatggtcatgaccagtacaggtgcagcgtctgcagtatccaaagccattcctgagcttaaaggcaaactgtcaggcaacgccattcgtgtacctaccccaaatgtttcattggcaattttaaacttaaactttgaaaaatcagtgggtgatactaaggcaattaacgcctttatccaatccaaggcacaaagtgagcagtggcaggcacagattgactattcagactcacctgaggcggtgtcaactgattttgtgggttctgaaaaagtggcaatttttgatgccaaagcaaccattgctactgataaccgtgccaccttatatgtttggtatgataatgagatgggctatagcactcaagttatccgtgtggctgaagagatggcaaaataaagccttatctaacttttgagttacccagctatttttgagttacccagctattttgaccaaaagcctatcagttaatgctgatgggctttttggctaaaaagacattcttggctcaccaaagagcgatttagagtgatttagtttacaatcatattatgaaattttacttaaatatcaatccaatatcggcgaatggttttaccattggtatttaacttattttctaaaataccaccgtgattctcaatcaccttagcagatgccaaattgctatcatcacaggtaatgagtacttgatttaagccgttttgttgacagtgtgtcagtgcaagcttgagcatttggctggcgataccttggccccagtaatttggatgagtactgtagccaatatgtccgccttgaacttttaaaaactcattcaattgataacgcacattaatcaccccaagaaccaaacccaactcatcgacaccaaaaaaagtatcatccgctactttaacaaaggcatgatttggtgcaggtgtgcctgcaggtgcacgactaaaattaagccaatcttcataactgtcaaataaagaaagtgacataccgtgtaataccagcccattatcttcaaaggctttggcgagtgataaaatttgcgactgatgagctagtgtcggcactatgagtgaaatcttaggcatgataattccttaaaccttattataagaggttttattttaccgtataaatgattttgtgttttgttatttttcaatcattgggcaatttgtgctacaatattcatcaattaactaaaatttgagcaaaattatgcgttttattgatgaagctgtaatcagcgtcaaagcaggtgatggcggtaacgggattgttagctttcgccgtgaaaaatttgttcccaaaggcggaccagatggtggcgatggtggcaaaggcggtgatgtttatgccattgctgatgacaataccaacaccttagtggactatcgctatactcgtaagtttgaagcacaccgtggtgaaaatggtggcagcaaaaaccgttcaggtaagggtgctgatgatatctatttggcagtaccgatagggacaacgattattgatactgatttggatgtggtgattggagatttaaccgaaaaaggtcaaaaaatcttgattgccaaaggtggtgatggtggttttggtaatacacgctttaaatcttctaccaatcaagcacctcgtaaagcaacacctggatttgctggtgagacaagaaatatcaagcttgagcttaaagttgtggccgatgttggtttgattggtttgccaaatgcaggtaaatcgacctttattcgtcaggtctcagctgccagacctaaagtggctgattatccgtttacaacacttgtaccaaacttaggtgtggtagatgttggctcgcatcaatcttttgttatggcggatatcccaggtttgattgagggtgcatctgatggtgcagggcttggcattcgatttttaaagcatgtggcacgcacgcgtcgtttgttacatattgttgatgttcaaccaattgatgaatcagatcctgttgctaatgcacagattatcttaaatgaattgaataagttttctcaagagttatcacagctgccacaaattttggtattaaataaaattgaccaaattcccaacgagcagcgtgatgccgtttgtcaagatatcatcacacgattgggctggacaggcgaagtattttacacctcaacgctgactggcgaaggggttgaagcggtcaaacatcatttgatgcaggtcattgaagatgagcgtgagcgtgagcttgaagatccaatgtttgctgaagcacaggcggctcgctttgcacgccttgaagaagaagtgcgtcataataccgaaatccaaaaagaagcttatcgtgcgatgcgtaaagcacagcgtgagggcggtgatggtgatgacgatgataattggaatgatgatgattatgatgttgcagttgaatatgcaccttattaaagtgagctggcatcatcattttaagggtttatcagcgtttttaagcatatttattttacatgcaatggcctgttaatttggcaaattgtttgtgctatttaaatattgtataaacttaaatattgtataaaccatcgtttggcgaccagattggggatgtgatgcctgtaatcgcaatcaaccaaaaattttgctatctattggcatgattgagatttatggtatccgtgatgatatgaccattttataacttgataaacataggtttttacttagattatttaaataattaagttattaatcctaaaaaataaattgatagagagatttatgacagcacagtttgcccccctaaaaaatgaccgcttattgcgtgcattaaagttcttgcctgtggataccacaccagtttggatgatgcgtcaagcagggcgatatttgccagagtataagcaagtgcgtgcacaagcaggcgattttttaagtctatgtaaagatattgataaagcaacagaagtaactttacaaccattgcgtcggtttgagttggatgctgcaattttatttagtgatattctaaccattcctgatgcttttgatttgggtctatactttgctgaaggtgaaggtcctaagctgaccaagacggtgcggacagagtcacagattatggcgctgccaaagattgacatgacttcatcacttgattatgtgatgaaggctgtaacaagcattcgcaaagcattaaatggtcaggtgccattgtttggttttagtggcagtccttggactttggcaacttatatggttgagggcggttctagccgtgaattccgccataccaaacacatgatgtatgccacgcctgagcttttacatgcattgcttgcaaaaattaccgatgcagtggttgattatttagatgcacagattgtggcaggcgcacagattgtgcagatttttgacagttggggtggagtgcttggtcatcgccagtttaccgaatttagccatgcttataatcgtaagattgttgcccgcctaaaagccattcatcctgatgtgcctgtgatattatttaccaaaggcggcggcttatggctagatgttcaagcagatagccaagctgatgcactgggtttagattggacaatgccattagataaggcgcgtcacttactacacgccctaaatgccaaaaaagcaatacagggaaacttggatcctgcaaccatttttggttcaccgaagatgatacaaatagaggttcatcgtatgttagatgatgcgtatgtccttgataaatcaggttatgttgccaactttggtcatggcattacacagtggtcaaatcctgaccatgctaaggcatttattgatgcagtgcatgattatcagatttcataataagttagaccaccccctaagcgatatactcagggggtttatcaatagcgatatttgttctaaattggcaactcaatcatcaatcaagtgtattgccataaaatcatctgataccaaaagataatagtattgaagctttgtcatttggatatttatttaataaatttatttaagataatattcattatctatgatattttaaagataaaataatcactaaggcttgagctttggcataatattatgaatgatattcatcaaagatatcagattttttattcactataaatttaaaattattcatcaatatgttgtgagttatttgcaatctaaccacatttccgctaggataattatttgattgttaacatgttaagggatgagatttatgagtatcactgagcaaaaaaaattaatatcggtatcgttggggggttattcctgatacccgttcggttcgagtatctaataaactgtgtatcggcattcatcacgatatcgatgttttgacaatcattgtggtgcaagacacttgtcaggggtgcagcagggcaagcggtacaaaatatgaacatcatgtttggttttaatgagataataggactggatttggtgccagtgatgccttgattgggtatgttattaatgattggcttgtgctgacatagttattcgataaattacttgtaaactatggtgaattttattagcattattcaacagtacccaaataaatgggtaatattgatatgctaaaatattgccataaccctatctaggactccaaaaagcataattttaaggtatgtatgcaaacaaatatccgttttcatcatcagtctggaatcagtgttctactgattgtttcatggcttttgctggctgtatttgcacttattattggctatttggtgatgaacccaagtatcataaccaaagaacaattagagcagccatctgccataagtgtatcgaatgaaggtgagtggcaacccatcatcgccgatgatagtacaaaaatacatcctgatacacctgcaccaattgcgtcatattatgaagcagtaaaccgagctgcccagtcggtcgtgaatatttataccacccaaaatgcacaccatcaactatattcaaacgatcctgtattgcagcagtttttggagcgttattatggtggagcaccacatcaaggcgtaaatctaggctcaggtgtagtggtgtctagcgaaggctatatcgtcactaatgcccatgtgattaacggtgctgatgagattacagtggcactaaatgatggtcgtaaagcacgtgctaccgttatcggtagtgatgcagacagtgatttggcggtgattaaggttgagctggataatcttgtaccaatggcatttcgtgctgagccaattcgtgttggcgatgtatcactggcaattggtaacccatttggtgttggtcaaacagttacccaaggcatcatttctgcgacaggacgcactggtatcggtgtcagtagttttgaggattttatccaaacagatgcagcaattaatccaggaaactctggcggtgctttggttgatgctaatggtgctttgattgggattaatacggcgatttattcacgctctggcggttcgatggggattggttttgccattcccaatcaaattgtccagcaagttatgacatccctcatcaccacaggtaaagttagccgtggctggatggggattgaaatggtgcgtatgacagatgatcctacaaatatcgagagtcgctcgaatgttattattcgtcgagtttggcagaatagtccagcagagcatgcaggcttaaaatctggtgataagattgtgcgtattgatggcgtacacattaccagtatcaatgagcttgtcggtgttgtcgctcgtaaagcacctgacagtcagctgactgttgagatcatgcgtgatcagagaccgatgaccgtacaggtgatattagctgagcgacccagctcagaaacattaagccaacctgtacaaaactcacccagtcagtcaagacaaagtacacagcttgaacaactattgcaagagctagaattcctgcatggcacaccacaatgatgtagtttaatattaggcattgttaaattaaaatacatatcttaagctaccattccgcttagcaaataataaattcaacgtgttttctatcattttttcggatttagaataacactttgactttcttgtaaatcttgctatgaaatgcctaatgagactattatagccctctatggtaaaagtttgagctttgcttgttatatgttttggctttaaaatgacttgacgataagatttccagtagtcactaaaaaacagttgcatgttatgggtatttaactgctgataaagtcgtttaaaggtgttagtgtctgttttaccacagacaaagcctaagatttgtttactgtttgtatcaatggcttgtttttttaatgtcattacttttttggttgcttcgttgcttcacagaaaaatagtgatggtaacctttgcatttgtatcgttgtttgccattgcccaaacctgcttttacaaagtgtgtgcagtaacattttgggcaattattaaatgtttcgttcacaagtttctttgtgctatggtaaagtattgagctattttaacttgggtattgttttttaacaatacctaatatttaaaccttggcaaatctagcttgccaaggtttttattgaaataaccaaacatgccgcattaagtttttagttttcacggttgggtgggtatgctaaaatagcctattatctgatttttatagccgatttatgcaccatttgatcacattgattcgccaatacagcttagtgctgattattttggtcatttggcaatttgtggtggcagtaggtatactgccagattatcttttgccaagtccttggcaaattctacacgcactcattgatgatgccaaacttttggcacatcatgccaaatacactttagccaccgcctttattggcactgttattggcctagcgttaagttttgtgttatcaattttgatggatctatcacgcaattttcgccaaagtgtgtacccactgatactactgaatcagaccattccaaccattgctatcgcaccacttttggtcatttggcttggctatggtattttacctaaagtggttttggtcgtgttatccgtgttttttccgatgactattgcactgcttgatggctatcgttctgttagtacggatgagttaaatttattttactccatgaaagccaacatttatcagacttatcggcatcttaagattccctcggcaatggggtatttttttacaggtcttaaagttgcactcagctatgcactgatttcagcggtggtggcagaatggcttgggggatattatggtttgggtgtgtatatgacccgagtgcgtaaatcctatgagcttgataacatgtttgcggtcatttttttgatcagttttttgacattggcgttaatcgcattggtgaaatggctggagtgtcatgtgcttgattatcaatataaggaataatgatgaaaatattttgttttcgaccactggttggcgttgccttggtagccgtattagcctcattaatgactgcttgctcaaatgggcaatcaggcaatgagccaaaacttcaagagttgattattgcactagactgggtgccaaacacgaatcacacagggctatatgtcgcacttgatcaaggttattttaaagaagctggatttgatgctaagattgtgcaaccaagtgaggacagtacttcaactttggttgcaaataagcgtgcagattttggtgtttattttcagccaaatatggttaagcgtctaaataaaggagaaccaattactgccgtggcggcgattacacagcacagcagtgcaggactgttatcgttagccaagcttggtgcagataagccccaagacttgcagggcaagcgttactcaacatgggaagatcctgttgatgatgccgtggttgaacagattgttggtacgccccttaagaaaatccccggtgaatctactgatgcaacgaccgcactacgcatgaatcagtttgattatattatggcgtactacagctgggatggtatccatgcagatattaaaggcgtggatacaaactttttttatttaaaagatgctgatccaatttttgactattatgcccctttattaattgcaaataatgatgagctaaaaaatcaccctgaaaaatataaaaaggcactggcggcaatcaaacaaggctatctatacgccgctcaccatccaaatgaaagtgctgaaatcttagttaagtatgcaccagagattaatgtagagcttgccaaacaaagccaagcatatatctcgccgcagtaccttgatgaacaaggtgattggggacgatttgactatgatcgttgggatcggttttttaattgggtttatcgcaagggtttgatgaatgaatttacgccaaaatcaggtgtgaccaatgattatttaactcaataatctatcgcttatgcacccaaagcttgaatttaaaaatatcagtcatgcgttcaccacgaatgcaaagacgccattatttgatggtctgaatcttaaagtcgcccaaggtagcgtggttagcatcgttggggcaagtggcgtcggtaaaagcacgctatttaatatcgctgctggtctgatttatcctagccatgggcaagtaatgatcgatggtaagaatgttacaggcacatctgggtatgtgggctatatgctccaaaaagacttattactgccctataaaacggtttatgataatatcgctttgccattgatgttgtcgcataaaaccaagcaagagattgcagcacaaattcagcctaatttgacaatttttgggctagatgggctgactaaaaaatatcccaatcagctatctggtggtcagcgtcaacgagtcgcattacttcgcacctatttatccaatcgtgaactgatgctacttgatgagccattttctgctttggattttgtgactaaggcggatatgcatgagtggtttggacagtttcgccaagccaatcagctgacttgtttgattatcacgcatgatattgatgaagccatttatttatctgatgaagtttatgtattaaaaggcatgccagcgatgtttacgcatcatttttgggtacctaaacagcgggatttttatcaatctactgaatatttaaccctaaagcagcaaattttaaccgccattcgatattaagcatgcgtttgggaaaaatttaacttcaggtttttctaaaattgtttttctaaaattaatacaaaaaaaccagctttagcagctggttttggatatcttgataaataatcaaaatgattaatataaataatcaagatgattaatcaatacgctcaatggttacattaccaacattaccagtcataccaatggcttgggcagcaccataagacaaatcaagcacacgattggttttgggtcgatcgttgattttgacgaccacagatttaccattatcacgattggtcactctgacatggcaattcattggcaggctactgtgtgctgccgttaaggcattcatatcaaaggtttcgccactggcagttttacgaccatgaaactgacgaccataccatgaagcgatgccattttgtttgaacttattgacagtgcttgaagcgactgcggtcagacggtcaagcacaggaatatcttcatcggtttttttggatttggtggattgagcaatcattggactgttaagcgccaaagaggcgggttgacgcactgatttgaccaagcttgacgcattattatgctgcgtggtgagctgctgtagtacattgtcgatattggcagggctattgccagcttgtgcattcatgcttaaacttgcggttaaagtaatgctcgctaatccaagtaaagatttgctcactgttttcatggttacacctttagtattgcatactctgacaataattgagaaaatctcaacatactgaccaaaatatgtacacaaaaatgtacaaataggcacaaatcagagtcaaaacattatgtaaaataccactttaaaagatcaatgcagtatcaataaaaattaataaaataaaaggctcattgatgttgtgtgcatcaaataccttatcttagcactattttttgaaattacaaggctaattattcaccgttttggctgatattgatcaaattttgtacaaaatatgggcaaatgttcaaaaacaactgcttggagaaattatcatctgatttcatttaatacaaaatctaaataccaaaacaggtatttataattgatattattaataatatctttataatattgggctgactgaccaaatttaaagtaattaggtattgttttgacgataaatcaaataatttggtgataaattgatgaaaaattttaatcaatactttataactacacttatcagcagtatgctggttgcatgcagtgcacccataccaaccaatccacaagtatccccaataaaaacgccatcggtactgattactaaagataaaatcggtgatcatcatacacatgagcacgatgaatctgtaagccatgtcggtttgcaggcacattttgagacttggctacagatgcaccatgccaccaaacaagaggtagttaggtatcaggcgtatttacaatcaagacttggtaattatctgccaccaatgagtcaactactaacgactgcacggtcatggcaggcatgtggtcatgaaccttatcagctgccaccagaacatctttggggtcagattgtaccaacattgcacttgtatcaagatctcaaaagtaggggcatattgccagcaaatacccaaattcgctcagtttatcgcaatcctgaactcaaccaatgtgctggtggtgcagctatgagtaagcatttgaccaatagtgccattgatatttgggtgcctgaccttgaaataaaaagccaggcactgtatgagcttcaaaaccgcctatgccaatattggctagagcatggcgaaaaccaaaattttgggctgggtttatacgccacaggggcgattcatctggatacccaagggtttagaaaatggggtgctcaattttctgaaacaaactctatttgtcgtcatgtcttaccaaaaaataagctataattattggctaattttgagcggtatatcgtatgttgccaacacgccttattcaaaatcgtcatatcttaacgaaacttggtatcaccatatgggcatcaaaatatgctgatgtgacgacgctaccatctgcccatcagccaccaccgcagaagggggtgccgacagcagctccgacccaacaaattccaacccagcaaaatccaaatgcccaaacgcagttagcatcaacacccgtcacacatcgcccaaagcaggtcattgatacaccgccaaaaactcagcaaaccaaaacatctcatctaacattaccgccacatcatgaagttttggatatccatcagtcgtcttttgcagccaagtcaattgaatatcatttgaaagtgatgatatatcgcaactggataatgatggctgatgtcgatgctttggacgcagcagggcatgaactttggctgtcgttacatcggtcgctgactcggcaggcaaaacagcagcagctgacattggtcagcaggcaatttgactacccattatttgaagatgatctgacaggtgattctgtttttttggcaaatatcagcctaagagggtttatatttgggtgtatgcgtgaatctggtcagataaaataccttgcaccattgacagctttacctgattatctgaatttgcaaagtattcaaaatttaacacttattagcgattatcacattgaccaaatgttgctagatggcacgacaaaaaaagcattttggcaagcgttgcaccgttgaatgatgattttcattgatgaaattttaaatacaaccaaatgccataaagtttcatgctatactatgataaaaatttaggcattttttaaggataatcatatgactcgttttgccaatttttgtgcaggtcccgccagtatgccgaccgccgtccttgagcgtgctcaagctgaaatgcttgactggcaaggtcttggcacatcggtgatggagattagccatcgcagtacagattatattgagatggctcaaaaagccgaggcaaatttacgcaagctcatgggtatcagcgatgagtacgctgtgctgtttttgcaaggcggtgcaacgctacaattttcagcaattccgctaaatctgatgaatggcggcgtggcggattatcttgagacaggtacatggtcaaataaagcctataaagaagccaagcgttatgaagcgttgggtcttggtcaagtcaatttggtagcggcgggcagtcagacacagtttagcgacataccagacccaagcacttggcagctcaccaagggagcaagttattttcattattgcccaaatgagaccattcatggtgttcagatgtttgatgtgccaaaggttgatacgcccatcgtggcagatatgtcatcgtgcattttatctgagccgatttcggtggataaatttggtctcatctatgcaggtgctcaaaaaaatatcggtccagcaggattgactttggtcatcattcgtaaagatttgttggagcaagccagcgaatactgtccgatggtgatgaattataaaaatcagcataccaatgattctatgctcaatacgccatcaacttatgcgtggtatttatcaggccttgtgtttgagtggctgcttgagcaaggtggcgttgaggcgattgcaaaagtcaatcacgctaaggcaaaaacgctgtatgccgccattgacggtagtgatttttatcataatacagtcaatccaaaccatcgttcaatcatgaatgtaccgtttcatttggcagatgacagtttggataagcgatttttggaagaatccaaaaaagcaggcttgctaaacttaaaaggtcatcgtgcggtaggtggtatgcgtgccagcatttataatgccatcacacttgagcaagttcaggcactgacggcatttatggcagaatttgaacgcagatacggctaagcatacccaaattttatggtgatttggttattaagtccaacgatgctaccaatatttagcacaccctaatattatccaaattttaaggtaagagatgagtgattgtcgcattcaagcagttttggcatttgaagataattatatttggctcattgaaaatcaaatgaccacaattatcattgacccaggcagcagtcaagaggtgctggcgtacttacaaaaaaatcagctgacgcccagtgcaattttggtgacgcatcatcatgacgaccacacaggcggtgtcagagacttacttagtcaatataaaaactgtgccttatacgcacatgccaatcatggttttgatgatatacccaaagtcaatttggtcgatgaaggtgatcattttgcggttggggacatctgctttcaagtatggcgtaccgcaggtcataccgatagccacttaagctatgtgacggagattgaccaaaaaacgcgcgtattttgtggcgatacgctgtttagtgcaggctgtgggcgagtatttacaggcacgatatcgcagttatctgccagtatgaagcgttttaatgacatggatgagcagaccgttttttatcctgcccatgaatataccgtatcaaatttaaaatttgccaaaagtgtggctttggacgaacatcaagatgccatcaagcacgccactcacatcgcaatcacacagcgacaaaataaccaaatgacactgcctgttagcttagcacacgaacgccaaattaatgtctttttacatgcttgtgatgataataaagccaaacaacttgccaatcagcatggattaaatgatgagtcggcgttggcggtatttagatggttgcgtgaacaaaaaaatcatttttaaacttaaagcgtgcctgcctttggttttttggataaaaagtgttgaccgatttttatacaaatttcatgcaacaatggacaaaaatctaggctctgggcatgccttaatactcttataaacccatcatttagaatggatatgcccaaactcttaagcgtcaaatggcagaacgatgaaacacctctcttaaaacaaaactggtatgtagctggcttacgccctcaattttactgagccgatgtaataaaaactcttcataatgacgcatgtctttgaccaatactttcagtaaataatcttcactgcgtcctgtcacaacgctacaactgaccacctcgtcaaaattttggatttggctttcaaattcataaaatcgctcagcggtatgcttgtccatactcaccgcaacatagaccgataaagcgtagccaagtgccgtaggattggtagcagcgtgatagcctgtgataacgccaatatcctcaaggcgtttgattcggcggatggtgggcgtgggcgacagatgaatctgttcgctaatctctgcgatggataatcgggcgtcatcggtcagtatacgcagtattttttgatcggttgtatctaagtcggtctgtttggcgacatggctcatatggattatccaaagaatagcgataaaattagttatttttactatatattagcatatttttagcaaaatcatctaaaatatcttataatgactatcaaaataagtaaaaattaccatacgatatttgatacaattgaaccatcaaaatcgttaccattcaatatctaaaagtcaatgaactttttggagcttttatgccacacattaccccaaaaaaccctgcgtttgattttaataaatatcagccgtttgcgtttgcccctaagcttgaaaaccgtacttggcctgataagaccatcaccaaagccccaatttgggcaagtgttgatttgcgtgatggcaaccaagccttgattgatccgatgagcatcgaacaaaaattaaaattttttaaactgcttgtagagattggctttaaagaaattgaaatcggttttccgtcagcggcacaagttgagtttgattttacacgccgcttgattgaagagggtcttgtacctgatgatgtcaccttacaagtcttggtgcaggcgcgtgagcatttgattgatcgaacctttgaggcactcaaaggagcacgccgtgcgattgtacatgtgtataactccacctcaaaagtgcaaagagataaagtttatcagatggataaagcccaaattaaacaaatcgccatcgatggtgcgaccatgctgcgtgataaagcaaagcattatccagacacgcagtgggtgtttgaatattcgccagaaagcttcagccaaaccgaaaccgattatgccgttgaggtgtgtgatgcggtctgtgagatttggcggcctgacactgggcaagcagtgattttaaacttacctgccactgttgaggcatcgacgccaaatgtctatgccgaccaagtggaatatttttgccgacatctaaaagcacgcccccatgttaccatcagtctacatacgcacaatgaccgtggctgtgctgtggcggcctctgagctgggattaatggctggggctgatcgcatcgagggtacgcttttgggtaatggcgagcgtacgggcaatatggatattttggttatggcgatgaatctgtacacccaaggcattgacccagagcttgattttagtcaggtgagcgacattgtacaaattgtcagcgaatgcaacaatctgccagtacatccacgccatccttatgttggtgaacttgtctttacggcatttagtggctcacatcaagatgccatcaaaaaatctttagattataatgaaaaacaccccgagacccagcagcattgggatgtggcatatctgcccatcgacccaatacacatcggtcgaggctatcaagatgtggtacgaattaatagccagtcaggtaagggcggtgctgcgtatatcttgcagcggcattttggttttaatttaccacgctggacacagattgattttgctcgtgtggtacaggcttatgcagaaagtatggcgcgtgaactaaaaactgatgagctgcttgaaatttttacccaagcgtatcttaagcaagataaattccgcctaagtgactataccatcagcaataaaggcgatgctgtcagcttccaaggccaagtagcgacacccaaagcggtgtttgaggtgattggtcaaggcaatggtgcgttatctgcgttcattgatggcttggtgaaatccacaggcagacagattcatgtcaccaattacgccgaacacgccatcgataacaaaacccatcaaaaaaccgatacggataaccaaaccgatgccgccgtgccgcttatatccagctgtcggtagaggggcagatttattcaggcatcgccacttgccatagcaccgtatccgccatgctaaaaggtgcattatccgctttggcacaggcgtggtaatctgacccaatcaaaatcctgcatgatggcaggattttattatttagtgggctgcccaacaatgatgatcatcagcatgtgagcaaatgactggcgtaaatgactgatgagtgtctatttaatgaaagatatcaatatataaaagttgactatagcgatgcaatacagtaaaatttgttacggctaaacataacgacggtccaagatggcggatatcgccatttaccaacctgataatcagtttgatagccattagcgatggcatcaagttgtgttgttgtattgtcatataaacggtaaatttggtttggtggatgccccatctgatttaccgtccccctaataagtgagggggggggagaccccagtcatttattaggagactaagatgaataaaatttataaagtgaaaaaaaatgccgcaggtcacttggtggcatgttctgaatttgccaaaggtcataccaaaaaggcagttttgggcagtttattgattgttggggcgttgggtatggcaacgacagcatctgcacaacaaaaaataaccggctcaaacataaccaacgacacctctaccgtcggtggtggcgattataacgaagccagcggcacatactctaccgtcggtggtggcattgataacgaagccaaaggcgattactctaccgtcggtggtggcttgactaacaaagccaaaggcaattcctctaccgtcgcaggcggtgctaaaaacgaagccaacggcaattactcaaccgtcgcaggcggtgctaacaacaaagccaacggcgattactctaccgtcgcagggggcaggaagaaccaagctacaggtcttaactcaacggttgcagggggttctgataaccaagccacaggcaacaactcaacggttgcagggggttatgataaccgagccacaggtacaggttcatttgccgcaggtgtagggaacaaagccaatgccaacaacgccgtcgctctaggtaacaagaacaccatcacagtacaaaactcagtagccatcggctctaataataccattgacggcaatgacaaaaaagatgtctttattcttggctctaacacaacagacgtaaagagtaactcagtgctactgggtaatgagaccgctggcaaagtagcaaccgctgttaatgatgccacagtgaacggcttaaccctaaaaaattttgcaggcgtatcagaaactagtaatggtactgtatctgtcggtaagcagggtaaagagcgtcaaatcgttaatgttggtgcaggtcagatcagtgacacctcaacagatgctgttaatggctcacagctatatgctttagccacagctgttgctaaaaacaaagctgatatcaccaaaaatactgaaaatatcaaaaatctagaagtagcgacacttggtaaccatgcagatgttcaaaagcttaaacgcaagcaagaaagcgacatcaaagatgttgttgaaatgcaaaacgcaatcgctgaacaagctgatataaacaaaaatcatatccaagacctagcaaaagctcagctggctggtgtggcggttatggaagagttagataagcatgtcgaagatctgtatgaagctaccaatgaaaacttggataaaatctcacagctagatggtgcagtgtttaacaatacacaaaacatcgaagatctggccgcttacaatgagctacaagatgcctatgccaaacagcaaaccgaagcgattgacgctctaaataaagcaagtgatgagaacacacaaaacattgctaaaaaccaagccgatattgctaataacatcaacaatatctatgagctggcacaacagcaagatcagcatgcctctgatatcaaaacacttaaaaacaatgtcgaagaaggtttgttggagctaagcggtcacctcattgatcaaaaagcagatcttacaaaagacatcaaagcacttgaaagcaatgtcgaagaaggtttgttggatctaagcggtcgcctaattgatcaaaaagcagatatcgctaaaaaccaagctgacattgctcaaaaccaaacagacatccaagatctagccgcttacaacgagctacaagaccagtatgctcaaaagcaaaccgaagcaatcgacgctctaaataaagcaagttctgagaatacacaaaacattgctaaaaaccaagcagatattgctaataacatcaaaaatatctatgagctggcacaacagcaagatcagcatagctctgatatcaaaaccttggcaaaagtaagtgctgccaatactgatcgtattgctaaaaacaaagctgaagctgatgcaagttttgaaacgctcaccaaaaatcaaaatactttgattgagcaaggtgaagcattggttgagcaaaataaagccatcaatcaagagcttgaagggtttgcggctcatgcagatgttcaagataagcaaattttacaaaaccaagctgatatcactaccaataagaccgctattgaacaaaatatcaatagaactgttgccaatgggtttgagattgagaaaaataaagctggtattgctaccaataagcaagagcttattcttcaacatgatcgattaaatcgaattaatgagacaaataatcatcaggatcagaagattgatcaattaggttatgcactaaaagagcagggtcagcattttaataatcgtattagtgctgttgagcgtcaaacagctggaggtattgcaaatgctatcgcaattgcaactttaccatcgcccagtagagcaggtgagcatcatgtcttatttggttcaggttatcacaatggtcaagctgcggtatcattgggtgcggctgggttaagtgatacaggaaaatcaacttataagattggtctaagctggtcagatgcaggtggattatctggtggtgttggtggcagttaccgctggaaatagagcctaaatttaactgctgtatcaaaaaatatggtctgtataaacagaccatatttttatctaaaaaacttatcttaacttttatgaagcatcataagcaaagctgagtaataataagagatattaaaataagagatattaaaactgctaaacaatcggcttgcgacgataaaataagatacctggaatggacagccccaaaaccaatgctgagatgataaaaatcgcctcaaaaaaatgacgcatcataacgataaataaatccatatcaaatccaaaatagccaatttgtaccatgctaaccatggctttataggcagcgattcccggcatcatacaaatcaagctaggtacaatcaaggctttaggcggcaggccatgacgctgagcaaaatgtacacccaaaaagctacccgccatcgccccaaagaatgttgccacaaccagatgcacaccaaaagttaccatcacttgttttaaaccaaaaccaagtgctgttaccatcatgcaatgcatgatgtattgctttggcaatgtaaacattaaacaccagcccacagtaatgatacatgacaatacaattgtttggataatctcgataatgcccatcatagtccccaatgtggaattctaagaaaaatcaaggtcatcacaatcccaacacaggctgataaggttagcatggttgcaaacatccatcgacctacgcccatattcatatagccttttaagatatccgataacgcattaataataggaaagcttggtacaagtaatagcacactggcagcgacagcaatgtcagcattagtacctaaatttaaaaaatatgccaaagctgccaataaagttgcggtaaatgccgttatcatagcgacgacaaaaggattaaaatgttgctttaaaagatacatacgcaatcgcatcgcaacaaaactggcaataaaagtaatcagagcaatcaccaatgttgcaccgtttaaataggcaaaactggcacatgatacgcccacaaaaaatgataccaaatgattagaatagacagtttggtagatggcatcaaacccttgttctacgctactgatacatgcgtcatggctttgggtgtttaaacaatgagattgattggcttgatgattttcggcacttaagataatttgttgaatttgtactaagatactgacattaatgccttgatgaacggtatttctcaccgttgtgatacagcgaccttgatataaagtggttaaggtgaccgcattaaatgacaaaccgcactcaacaccatcaatcccaagtgccgccccaagccgctttgttaaatcaaccaccaccacagactctgcaccatattgcatgagtagtaaagcacagcggatacataaacgagtgattcgttgttgctgagcatagtttaggcggctggtatgcgtatcaaataaaatgctgggcatctcgtcggtcaaattagtcattgggtgacttttggtggcttgaatggttggcataaaatcacttaaattctaaattcaatgaagccgatgaaatagccaattttaggacgcattcattggctttagcacccgaattggcaaaaaaatacttgcaccatgccagcggcttgacacagcacagtcgccgccttttcctgccaatcaatgccaaataagccgtaccatctttggtgtacaggtatgaaccttcgccacgcacaaaactgatgggttggcggacataagtgggtatgatgtgactgttcatggcatatccttatgttgacttgaatgattaattaatagtctgtaacttcatgatgttcaggcgatggcagttcatcacctgcaatcaaatactcatcagacgcccatgcacccaaatcaatgagcttgcagcgttttgaacaaaatggacggtttgggttgtcagaccatgtggttactgcttgacatagtgggcaagggtgggttatttggttcatttaataggtataagataaaaataaattgtattttatcataatttggcaaaactaagcagccaaatactcaagtaactgatatgatgagataaaatgtgtacaaaagtgtcgccaaataccagtggtaaccagacttgacgccacttttaccatggattgttctttttatatgataaagttcgtaaataagacatgacagaagtattaaagcaagctataatcccatgtgattattttaaaataagacttaaaataagactaaaaactgcaacagcaggtgaattatcaatagcaataataaggaggatattgtgagtgattcaaatctggtcaccgatgataatcatagtttgaacaaatcataccgtgaactgcatcgtcctagctcaagttttgaaaaacgagaggattatttaaagcacgaactacaaattatgcagcctcgtcgctggcgtatcaatttaccgtttcgtgattaccgttttgaattagaagatactatccctgcaatggcaggcaccattggtaagattgtgatggtgggtgcgatggcagctgcttttgctgcaccgctagggcttagcgaggcatttgtttagaaaatgtccgctatgagatgattattgctgcatgttttgtacttattgtctcatcatttat

SEQ ID NO: 18 - DNA, 34001 bp, Moraxella catarrhalis
  unsure 33951-33952: a or g or c or t, unknown, or other
atgttggtgtgatggtgaattgggtaaaatattgttacatttttgtttccattggtcaaaggtgatatttgttgtgtttaaatttgcgttctatggttcacaaacctgcgtggaatgtgtattgtattggggagtatgtttttattttatttacccaaaacaagtgataaaaaagaggattttatgaaaatattagtcgcagtcaagcgtgttgttgaccataatgttaaagtgcgtgtcaaagccgatgaatcaggcgttgagcttgctaatgctaagatgagcgttaatccattttgtgaaatcgccattgaagaggcggttcgcctaaaagaaaaaggtgtcgccagtgagattattgcagtttctattggcacgagccaatcatcagagcaaattcgctcagcattggcattgggtgctgaccgtggtattttggttgaaacagacgccaaagcacagccattacaagtcgccaaaatcctaaaaggcgtggcagaagctgaaggtgtgcagattgtactactgggtaaacaggccattgatgatgataataaccaaacagggcaaatgcttgccgccttaatgggtgtgggtcaaggcacatttgcatcagaggtggttgttgaaggcgataaagtgcatgtgactcgtgaaattgatggcggtttacaaacggtggcattaccattgcctgcagtgattacaactgacttgcgtttgaatgaacctcgttttcctaagttgccaaatatcatggcagccaagaaaaaaccccttgataccaaatctcctgcagattttggggtggaaatgaacgctaagcttgagaccattaaagtatctgcaccaaaagagcgttcggcaggcgttaaagtgtcatccgttgatgagttgattgacaagctaaaaaatgaagcacgtgttatttaatacccatgataaaccgataaagcttaaggataaaaattatgacaattttagtatatgcagaacatgataataaagaattaaagccagcaacacttgcaactgttaccgcagctgtgcaaatgggcagtgatgtacatcttttggtagcaggtgctgattgccaagctgtggcacaagaagccgccaaagtggcaggcgtgagcaaggttttggtggcagataatgccgcttatgccaatcagctggcagaaaatgtctcgttgttggtcaaggctttggcaactgattatagccatgttgttgcccctgcaactaccactggcaagaactttttgccacgagtggcggcactgttagatgtgagcatggtatcagacatcaccgccgttatagatgccaatacttttgagcgtccaatttatgctggtaacgcaatcgccacagtcaaatcaagtgaaaatgtggttgtggtgtcagtgcgtggtacagcatttgagccagcagaattgacgggcagcgcttctattgaatcggtagatatcgccgaagatgctgataaatcaagttttgtgaaagaagagcttgccaaaactgatcgtccagagctgacctcagccaacattgtcgtttcagggggtcgtgcattggcaagtggtgagaatttcaccaaatacattgaacctttggctgataagctgggtgctgcggttggtgctagtcgtgctgctgttgatgcaggttttgtacccaatgatatgcaagtgggacaaactggtaaaatcgttgcacctaatttatacattgccatcggtatttcaggggcgattcagcatttggcaggcatgaaggattcaaaaaccatcgtggctatcaacaacgacccagagtcacccattgcatcggtggctgattatttcttagaaggtgatttgtttcatgtcgtgcctgaactgattgaaaagctataagctaagccatcaattattgatatacacagttgatgacttgtgtccaaaaaagcatccaaattgattgggtgctttttttgatgcataagtttttggggcatgctacgcttgataatcgattaatactttaaaaagtttattaaaaatttataaaaataaaagggttgtttttagatgaaaattaaatcaattattaagttttatcatcgtttaaacaatgtgattaagcatggctatggcgtttaaccatcatacaagataatgacgctgacgcaacatttcataaaaacataccgaacctgcgataccaacatttaggctttcttgtccgcctggttgtggtaaggcgatgggtattgcattgtttaaaaattcatcacgcacaccttgaccttcatgccctagcacccaagcgatggggctggttaaatcatggtcatagatcactttatttgtatgtgaacttgtcgcatataacggcgtttttagcttttgtaaaatctcattaacagcgatatgttcataaattgatattgaaaaatgagcacccatacctgcacgcagacatttgggtgaccacaaatgagcggtattaggcgaggtgatgaccgtctgaatgccaaccgccgaagcagttcgtaatagtgtgccgatattacccaaatcctgcaagccatcaagaattaagcagtcaccgctgatcgttggtaatgaccgatggggaatatcaatcacagccatgacgctgatactttcgcccagcgtgcgtatttgttggtataaagtatcgctgatgatggtgatttgtttggggtcaatttgggataataacggtaaaacctcatcatgaaccgtggcagattctgagacaataagcctgtggacggctggcgtttgtttaagataggcttccaccaaatgcacgccctcgataaccgtttgcctgctttttttgcgagtgcgatgatggccaagtagagcgtgagtgtgtttgatgatggggttatctttagaggtgatggtcataattgtatgataaatgataaatgatgaatgatagcataagccgatgaatcaaacgccgcaccagtagcggcgtttgattgagttatgccatctcaccatttgccaagatacctgctttggcatgtaaatttttgacataatcaacctcttctttggcaccaagtaccacaggaatacgctgatgaatgtggctgggctgaatgtccataatgcgtaccacgccatcagtacttgcaccgcctgcttgctcaatgataaaactcatgggattggcttcatacatcaagcgtagcttacctgctttacctgcaattttggtgtcaaaaggatacataaacaccccaccacgaatcaaaatacgatgcacatctgcaatcatcgctgccacccaacgcatattataatctttattgcggatacccatatcacctgcaaccaagccattgatatattctttgatggggtctagccagtagcgataatttgacgcattaatggcgtattctgttgcactttcatcaatttttacttgattatcaatgcgtaggtattcttgtgttgttgggtcaagactaaacatgacaacaccttgccccagcgtcattgccagcatggtactggtaccataaataaaatagcctgctgccaattgtgaagtacctttttgtaaaaagtcggcttcggtggcttggctacccacacgctgatacggcaaaatagaaaaaatcgtacccacagtcatattaatatcaatatttgatgagccatctaatgggtcaaaagtgaccagtaatgttccatcatcatgagcagggctaatttcatccagctcttcggaggcaacgcctgcacagtgtgggttcttggttagggcatcaaggagtaaattattggcgatgacatcgagttttttttgcggcttcgccttgaatattttggttacctgcttcgccgtggatgcctgccaacgcccctttatcaagtaaggcactgatggcgatactgctgtttgccaaagtgccgagcgtgctggcaagctcatcacttgcgtgtgattgtaaatattgggttaatgtcatcataaaatatccttaaaaatatcttgagaattatcatcatcaaatcagcagactaagccaatcagaccgtgataattttttggcatattttaccataaatctgatggtctgtgtgttgccttgttggtatggatttttgtgggtttattttgtaaaacaatattgttttgaatgggaaaaatttgttaaaatgacttaattttattttgccacggcacaagcacgcatcacaagcatgcacctaaggaaaacccatgaccgccaccaccgcccgcctaaatcaaacccttgtccgcccacagcttatccccaatgacaatactggcatccgccattttatcggtgtggaggggttaaataaaagccagcttgaaagtatcattgataaggcgatgggttattttgatgaagatggcaagctgattaacaccacagagctgtcaggcaagacggtgatgaatctgttttttgaaaattccacacgcactcgcaccacctttgaggccgcccaaaaacgcttgggtgctaatgtgctaaaccttgacatcgcgcgttcaagcaccaacaaaggcgagactttgcgtgataccctttggaatttggaggcgatgagtgccgatatgtttgtggtgcgtcattctgccagtggggcggcccattatatggcgaccgaggttacccccaatgttgccatcatcaacgcaggcgacggctggcacgcccacccaacgcaggcaatgcttgacatgctcaccatttaccgtgaagcagataagccctttgatgaactttctgtggcgattgttggcgacatcaagcacagccgtgtggctcgttcggacatttcggctttgacgactttgggggtgcgtgatattcgtgtcatcgcccccaagactttgttaccaaaaggcatagaacgctatggcgtcttagtatttgatgacattgataaaggcgtggcagatgctgatgtgattattggcttacgcatccaaaatgaacgcatcggctcaccacttttgccatcaacttctgagtattttaaaatgtatggcatcaccgaacaacggctaaaacttgccaagcccaatgccatcatcatgcacccaggacccatgaaccgtggtattgaaatcgcatcaagcgtggcagacggcagtcagtcggtgattttaaaacaagtcaataacggcattgcggtgcgtatggcagtgatggcgatggcgatgtcagggcaacgacaagcaggtgattttaaagcttacaactaagatggatttttactttttatttttataaggataaggttatgttaacaaaattcacagcgttagtcatgggtgtgttgttgtcggtatcggcaatggcggcggatatggcgacggcggatatggcaactttgacacgccaagcccaaagtggtggtgcagtggctcagtctgatttggctgatgagtattatcagcaaggtaaccatgccaaagcatttgaatggtttaccaaagccgcccatcaaggggaagcagaggctcaacataatctgggtgtgatgtattatgagggtcaaggcgtgcgccaagattattataaatcggttgaatggtacaccaaagccgccaaacaagggtatgcagatgctcaatttaatttggcgctgatgtatgcccaaggtgatggcgtccgccaagactatcataaagcgtttgaatggtttactaaagccgccaatcaagggcttgcagaggctcagtttagtctgggtgtgatgtatgatgaaggtcaaggtgtgcgccaagattattataaagcggttgaatggtacaccaaagccgccaatcaagggtatgcaggggctcaatttaatttggcgctgatgtattatgagggtcaaggcgtgcgccaagatgatcaagaagcggttgagtggtacaccaaagccgcaggtcaaggtcatgcagaggctcaatataatctgggtgtgatgtattatgagggtcaaggcgtgcgccaagattatcataaagcggtggaatggtttaccaaagccgccaatcaagggtttgctcaggctcaaaataatctgggtgtgatgtatgatgagggtcaaggcgtgcgccaaaatatagcaaccgccaaaatttactacggacaagcctgtgatcatgggctgcaaaaaggctgtgataattatcgattacttcatcagcagggccattagcactgatgcatacccagtttgtcctaaatcaagcaaagaaagagactgttatgaaaaacctacttccccaagactggcagcagccgcacatctcagaggcggacactgcggataaatggctgataccacccatcgtggatctgtgtgcgcacctaagggagcctgggcatcagtcacatggtacgctggcaagcgaggggcgagcggcacgccaaaatggctttttgcatgtggtcatgccacctgataccagccctgtgctagaaaacggctcactgttaaagggtctcaaacaaaaagcatgggcagacggtggcatttacttgcatgttttgggggcattgagtgcaggcttagagggtaaacaacctgccaatctggcaggactaaaacaaggcggtgctatcggcgtgagcaatacagcggcaggttttgagagtgatttggtattgttacgctgtttagaatatgcagcgacctttgacatcaaagtctttttctaccctgatgaacccagtttatcggcagggggtgtggctcacgatggctatatcgcatcttttcatggattgcaaggcattccgtggctggctgagaccattgcactgtctaagcaaattttgatgaccgaagagacaggcattcatgcacattttagccaaatcacttgtcgcacctcggtagagctaatccgtcatgccaaacaaaagggcttgcccattacctgtgatgtggcgatgcaccagttgcacctgaccgatgatgacattgagggttataacgctcatgcttatgtattgccccctttgcgtagtaacaccgaccaaaaagctcttatcaagggtcttcaagacggtacgattgacgccatctgttctcatcatgaaccactgtcaagcagtgccaaacaagccccctttgcccaatgccaagcaggcatcagtaactttgacacctttgtgtcattgggggtgaaactggtggcagatggcgtgttaagtactgagcagttggtagaaaaaatctgcctaaatcctgccaaaatcgcaggcattacagattatgagcgcattggtggggcggtactcattgacccaaatcaagcatggacggtaaccaaagacaccatgctatcagcaggcaagaacacgccatttttggggcagacgctgacgggaagggtggagaaagtcttttttgatggctaaaactgctatttttgatgacaatgggtgatacatcatgaataaaaccctatttttatttgtgccagcaacacgccttgattgggtatcaaaagccaagcaatctaaagcaaatgccatcatcattgacctagaagatgccgtcgcagatgaccaaaaaaatcacgcacgcacagcactgatggcattagatgccaaaggcgagtgcagctattggctgcgtatcaatgccgtgcatagcatgcatcatcttgatgatattacttgtatgcttaagcttaatcatctgcttggtgttgtgttgccaaaatgccaaaataaacaccaagttgaaagcgtgtatcaccacattcataagcctgtcattgccatgattgagacagcggtggggatggcaaatattgctggtatcgcacacgctgatgggctttgggcgatgagttttggtagattagatttgatgtatgagctgggtgtgcaaccagattcgccagcatcacagctgatttttgataaaattcgtactgatttattgattcattctgtggcaaatggtcttcatccgcccattgagaccatttttaatgattttgaagatgaaacaggattggccgcttgtgtacgccactggtgcgattttgggtttgcaggtcagatgatgattcatccaaaacaaattgctgttgctgatggcgtgctaacagcacaagccgaacaaatggcttttgcccatgccatttgccaaaaataccaaaaaacaggcgagacggtctttgccattgatggtaagatggttgatttgccactgattaactgggcaaaaaacctaataaaagtcgccaaaaattaggcgttatctgtcgtaatggcaatggcttgattgatgtttaattgaccttggagcaccatgaataatctgtctatgcctaaggcaataccacaacaatcaggcagatgatcgcaggcggcaagcagacgatggtcaatgggcatgatgggcagaccttggcggcggcgttcgtgattatcttgctcaaaacgctttagcagctcttggctgttggcaagttcatcataagcattggcaatctcaacgccatgaatatacagctcaaagcgtcttgcaatctcataaccatcagcatcgaccgctgttttggcaagggcggcggtaagctttggataattgataactaaggtggggttttgtaagcccaattttggctcaataagatggctaaataataaatccaaccagccttgtttgtcatcgcccatatccaaatgaatgttgtgagcgacagcacactgacgcaagatatctggcgtactcatatcatcaaatgggtgtatgcccaaataatgtacaaatgcttgggcgtagctaatttggcttaagtggatgggtttttgataaacaacgcttaatagttctgataattcatcagccaatgcatctaggctaaaatttgggcgataccattctagcatggtaaactcaatattatggcgatggcctttttcgttatcacgaaatacttggcatatctgataaatgggcgtctgataagcagcaagcaatcgcttcatcgcaaactcaggcgatgtatgtagatagcctttggcttgacctgtagcaccttggaatgttgcttgaaccgattggatatatacatcagtattggctgcttgcgataatatcggtgttgtgacctccatgatattgcgtgcctcaaaaaatgctcgaatatgctgtagcatctgagcccgttttttggcattcatcaaagttaaggtaggtgcatactcactggccatcatacaaaaatttgccttattattaataaatatttaaaaattaaactgttgttaatcaaaaatccattctcgccgtaaatggtaatttttgcgaagtatgtcaaattgactgcccaaaatatgtggacaagctgccgcttttagtgcttcaaaatcagcctgaatatcataaaaccaagccagtggctgttggttttgatggtttaagagcatagaaaaatgataagggttgggcggtagtaatgccaaaaagtgctggaggattggtaagttaaaggtttggcaaaaggcttgataaatcatatcagtcccacggattttaccttcaagggtatagcctgcaatgtgtggtgttgccagtttgagtgcataaagtagctgttggctgatgaatggctcattaggaaaaacatctaacacaaccgataattgcttttggttaatggcagctaacagggcggattcatcaataatttctcctcgagcactgttaatcagtaaggcctttgggcggatttttgccaaggtttgagcgtttagcatttgataagttgggtggctacctgtttttgtcaatggtgtatgaatgctgatgacatcacaatctaaaatctcatctaagcttgcattgttgatagagtcagtcgccaaaaaaggatcaaagccaaatacctgccagcccagtcgtttggcatagcgtgctagagtattgccaatattgccaagtccgataatgcctaatcgcagattggtttttggggattgatgggcatgcaatatggctgttatgacatattgggcaaccgaatgcttactacagcctgatgcattggcaaaattgatatgatggtcggcaagatacttggtgtcaatatggtcaataccgatcgttgcagagccgataaacttaagcggtgtgttgctcaagtcgcccaaattttcttgggttacctgcgttactgagcgaatgaataatgcatctggttgatgggtgatgagactttggcggtcaatggcacgccctgccatcttgataagctccacctgatgacataaaagataatcatcaagattggcaatattttcatcagcaagaacccgaagcattagtcatccttagttaagttaggttgttgtttattgctaggggtggggttggtatcagccaataacgctttaccatctgcgaccacaaagccgcttgcttggttaataaaaatctcatttttgtgctgacttatccactcacgccacaccgccaagccaatggcaagcaccacaggcccgatgaacaaccccacaaaaccaaatgccgtcaagcccccaagtacaccaataaagatgatgatgaaggggattttggttgcaccactgatgacaatcggacgtatcaaattatccacccagctgatgactaaaattccccataagccaagtccaatgccttcggtggtatgtccttgcgataataaccacaccgccacaccgccccatgcaaagggcgtaccaaaggggatgagtgccaccacaaaggtgatgagtgtgagtaaaatggggttgggagcgttggtaaaagcatagcccatccctgccaaaatcgcctgagccaaggcagtcaatccaatgccatacaccaccgcttgtgtggttgctcctaccgagtcaatgtaatcatcaatgcggtcgccgatgatgttacgcatggcttgacggatttggcgtaccaaacttttaccatctctataaaagaaaaacaacgtcatcagagccatgccaagtttggcaaggttttttagcaccgcatcaaaggccattttgccataatacaaatgcgactgcacccaagcacgcaccgcctccatcgtggtttcagggtttttgttaatctcccaaagcgtgtctttaatcgtctgtccgataacaggtaagtccttgatttggctgggtaaatctaaatatcctgcttgtaggcgacgaattaccatgccaacaaaacttagcacttcatgttgtaggtagaacacacccacaataagcggtacgccaatcatgagcgagatgcaaaaagtcatcaaaaacgcactaaaactggggcttagacggactttggtgtgaaaaaaagtataaatgggaaaggtaacatatgccaaaatccctgcccataatgctggcacgataaaaaatcgcactactttaaagcacagtacaatcaagataacaagcaaggtcaaagcgagtaggcgttgtaagacgaactctctattccattgttcaatcatggtttcatcatggttcaatcgcggttttggcgtggtttttgaagcttaacataacaaactcaaagaagaaattgaattgggaatgtcgctacttattatgccaaaaacttgataaaaatgcttggggattttgtggtgtttgcgttgcacaagattaagcaaatctgttaaaaaaaccactagggtaacgcgtgagcaagcctatttagaccacctgcaaaggcgattttgtccttgttgctgtatggtttttgtccgcccatgcttttggggtcaagcacacccgtaccacgaagcgactccataaaatctcgggcatttaatctgggtttgatgttatctttgcgaaattcctcaccccgtggggtcaaaacctttgcccctttttctagcacatcattggcaagcggaatgtcgcttgtgatgaccaaatcgttgggctgcgctgtctgtaagatatattcatccgccacatcaaagccagcaccaaccacaacatacgataaaaatggcgatggtggcagtttggtcatccgatttgccacaaataccgccatcgtttgggtgcgattggcggttttgatgatgagctctttggcaatgacaggcagtgcgtcggcgtcaatgagtattttcatagcgaacaagttcagtcatggataaaataccagtcgttatgatgtgagcaattgtgtgatattggttacaatcccatcattatcatcactcatcactgtaatatgtccaatcttacgaccgtctcgctctgccttgtgataatgatgaaaatgcactcctgtatgggtcaaaagctcgctgacatcaggatatttgccgatgacatttagcatgacagacggcttgatgatgcctgtatcgccaagcggtaagcccaatacggctcggatgtggttttcaaattggctggtatttgccccctcaatcgtccaatgtccagagttatgcacgcgtggggcaatctcattggcgatgagtccatcatcactgacaaaaagttctaaggtcaaaacaccaacataatcaagatgacttaggattttactgatattggattgggcttgctcgatgagatggtcggcgttggcagcaggtgcaatggtttttgataaaatgccattggtgtgatgattttcaaccaaaggatagtaacaaatatcaccgttttgactacgcacagcgatgatagagacttcacggctaaagtgaatgaacccttcggcaatgagtggtgcaggtgcgtcggtcaacccgccatcaccagtgacagcgtcgccaagctcctcccaagcggtggcgatgtcgctttgtgttttgatgacaaattgtcctttgccgtcatagccgcctcggctggtctttaagaccaaaggtaacccaagtttgttggtggcagtttgtagctcatctaagctgtttactgccataaatggtacggtgtcaatatttagccgattaaacaataccttttctgccaatcggtcttgggtgatttccaaagcattggtcggcggaaacagactgcctttatgctcaaggcttgccagtgatttagccgtcttgataggcgtattttcaaattccaatgtaaagacatcgctggcggtgataaaatcatcaagctcattgtatttaaatacttgtccatataaagcagctggcacaccgtcagcatcttctaaaaaaacgcaacgatggccgagctttaaggcggcttgagccagcatcatgccaagctgcccaccgccaagaataccgatggttttgatggaatcagtcataaaagatatccaaaaattagcaaaaaattttggatattatcgcatattttaataaaaaatgggcgttaatttgccaaatgctgattcatcagtgattgacaatccctggatgggggcttgttagcaccgtctgggtctgtttttggcgaaattcatccagttttgtggcaagggcatcatcatcgatggcaagtatctgtattgccagcagtccagcattgaacgcaccagcatctccaatggcgagcgtaccgaccgccacgcctttgggcatttgtacgatggataataaactgtcccagcctgacagtgtgcttgatttgacgggtacgccaagcacaggcaatggggtttggctggcacacataccaggcagatgagccgctccgcctgcccctgcgatgatgacttttaagcccttatctttggcggttttggcatagtcaaagagtttatctggtgtgcgatgtgctgagacgacttgacattcaaaggggatgccaaaatctgccaaaatctgtgccgataaagacatggttgcccaatcggactgactgcccatgatgataccaacctttggggtgccagtgggggatgtgatgggagcaggacttggggcgtgttgggtgtttgacatgataatccttaaaaataataaacgaataagttagcatatttgctaaaaaatggcaatttctgtctttattctttggatttatctgcggtatgaatatactgtacaaaattttcatttgatagtatggggtttttggtatcaaattgataagcagtcaggtagccattcataccagcggaatagtcagtacaaaccacctgatttgataagatgcttggcgtgccatcaagccaataatggccaataaaaattggctgatgagtggtcagctcaaaatccatcggcaaaggtttgatatctaagtcgctgggcaggttcattgtcgctctagtgccaagctgtgcaatctcagacagtgggtgattttgccagtctttttgccaccatttgatacgagtacgcctacgcacgatgtcatgcccatccacaagtaccacacctgcaggtaaggggctttcgataccctttaaaagtctttcaagcgcataaaactcggtagagccactcatagcggttgcgatgatgccacgctgggtgatgcgatggtcaggggtgagatagggtgcaagtgctgcttgtgccttcgtatcccagcaggcgtgtacgatattcaattcaggcagctcaagccatagcggtagttcataaaggcgagagagccaataatagtagtcatcagaaccaatgggtgcttcatccaaaaatgcttgatgctgcttggtatttcggctggtatgggggcgacaatagccaccatcaggatgtggcgtagcgtatccgatagcattgtattcgtgattgcccatgatggcaagtgcttgattgttgtcaagcatgtcaaagacaatttgtaatgtggctaactgctgattgcccctgtcaataaaatcaccaataaaaatcgcttgatgaccgtgtggggcgatatgactgatgccatcatgaatatagcccaatttatcaagcagtcctgctaatttgttggcgtgtccatgaatgtcgccaataatgtcataaatcatcacaatccccttgtatcttaatctactttttgcctgctactatagcacatttacccaaaaagaacattggctaaaatcacgacacaaagtcactgataccaaatcaaattagcattatcataaaaatggtcgctggacttttataaccaaggctgttatagtggctaaatttatgggtgattggtttatgccgattaagcctgatttattgcaaattttgtatcaagatgcgtgcatggtgattatcaataaacctgcaaatatgttggtgcatcgctcttggctggataaacatgaaacttgttttgtgatgcaaactttgcgtaaccaaatcaatcaacatgtctaccctgtacatcgtcttgatagaccaacctcaggcgtattggtctttgctttagacagtcagacagcaggattattagccaaacaatttgagaatcatcacatccaaaaatcttacttggcggtggtgcgtggtattattggtactgggcggattgattatgcactaaaaccacgccttgataaaattgccgataagtttagcaatcccaataaagcatccaaatctgccataaccgattatcaggttcttgccacaacacagcaaccatttatatcgtgtcggcgttttgatagttctcgatattctttggtttgcttaacaccaatcacagggcgaaagcatcagttgcgtcgccatatgaagcatatttttcatcccattgttggtgataccacttatggcgataaagtgcaaaatcgtgctgtgcttgctcatattggtgtcaaaagactgttgttgcatgctcatcagttacagttttgtcatccgttatatgatgagatgatccgtattgttgcacccttagatacggccttttgtcaagtaatgacagcgtttgggtggtctgatgtggacttgatggcttaaaaaacaacctcaaaagggcttgacgattaccaaaatcacgactgcaattaatatgacaacaggaatttcattaaaccatcgccaataaacatggctcttatagtgcgggttttgagccagttttaggcgaaatttaccacatgctaaatgatagatgctaagcaaaataaccaacaatagctttgcatgtaaccagccttgagataagtataagcttggcgagaagcttatcatccaaagaccaaaaccccatgtggcaatcatcgatggtgtcatgataccacgatacaatttacgctccatcaggctaaagcgttcgatactggttgtatcttggctcatggcatgatagacaaataatctgggcaaataaaaaattcctgcaaaccaacaaaccatcgaaatcacatgaaaagccttgatatataaaaacacagtttcacccattaaaaatcattgttggtgatattttaccatcaatgataaacgctgacacattgcattgataaaaacaagcagacaaaaataacaataaagacgatgagagattatcgtctttatttaaatgaatggctgtcacaaaaaaattgattggttaaaatgccatttgtgcacccacaaatccaccaacttttgtatcatgatcttggtgattggcttgtatgccagcattcaaatgagtgttattacccaaagcaagtgttgcacctaaatgtgcgtgcgttgtgtgctttttatcaaagggcacggttgtgacaaagctgcgatgataatcacggttggataatacagctgtctcaacagttttgttattgtctttaaactcatgctgataacccaatcctgccaaaaggtttagtttatcattcatggcataatcaatattaacgccaatatcagcttgcaaagactgatggtcaggcagcttaaaacttagagcagttgatagatttggttgattttcaaagaagcgattctgcttgatatcttgagcatgaataccgacataaggacgataggtaacattgttttgggtaaatccatagctgccttgtacacttgcatatcgacgcttacctgtggcatgtgcttgatggttgcgattctcaccgtcccacatgatttggcgtaagctttgtgtacttaaatggtcaaccccaaggttggcactgatgcgtaagtgatcaaaatcatggcgatgatacaaaccaatgcctgtttgtttgacatcagcggttatagaatcgcttagatgataatcttgttgttggtaggttaaatatgcccctgtatgctggttaggtcgtgcaatatcaagtccaagtttgatggtagggcggtctattttattgcgtgtatcaagcgattgattgctgatgctgccatcaatccatagcgattgttgatgattgttaagactgtctaagcggcgtaccaattgttgctggctttgttgaccatgtttaatcagatgctggggtagttgacccatttggttggggctatcgataatagagcgataatattgtgccaaaatgcgatgcgtacgccctgaagggtgaattttatcagcaaacgcataagtttcattagcattcgcagcggtttgttgccagtcgcttggtttacatgctaacgatgataaattggcatctaggttttggcaagcaggttcggtcacattactaaacccaaatcctgctggattactaaccgcctctttgagtagggcaaaggtattggcagcaatgacattggtggtttggttgtttaaactttgatataaagtttggttgtagatatgagcagacaatgatgctgtggcagatttggtcggatcttgggcgtattctggcgtgacgccaacatcaggaagactgggtactaaaatgtgttttgcacctgcttgcccaagctgcccaaccaaattggcttggtcattggcagcggtggtaatgatttcggctgcttgcaactgggttggtgctttggctgcctcaaacaaatcattggcacctgtccaaacagtatacaatgctttggggtcggcttgatgattatttaaggtcaggtagcgattgatttgggtttgtgctgatgggatggtaaataaaggaatggtgaaaaaaggaacaggtgcatttttgaccacatcttctttagttcttgcaccaccaacggcatagtttgtaccagttaaggttgttccatcattggcatcggcggtatgtccataagattttgccaatatgcttgaccaaactggatcggtattggtcgtaaacgatggttgggcttgattaaaaacagaagacgccagactgtttttgccaatctgcaccaagcgtcctgtgtcagttaggctatcaccaaaaaatacggtttggctaaattcttgggcggtggcgatgctgcttaagcccatcagtgcaatcgccattgataaagggcggtatgtatgagccaccgctttgagcgttctttgggcgatattttgagtatgaagacttttggccttagtcgttttaaaagaaagatgatcaatcatcacggtttccttattggctacattaaataaaatctatcacaatcaagcatggtgatctttattgctattttttatgatttggttgctgttaaagataaaccattaaagctatgctgacagtgggcaattatggggcatctcggcagtcatcaccgcaccactcatagcatcaataattttgggctttggggcaggtttagagggcgttaacccaagctcagccatcagacggtcatcgtgtgatgtggactgattgcctgtggtgagtaatttatcaccataaaaaaatgagtttgcacctgccataaacgccaatgcttgctcaccatcacttaaactttcacgcccagcagataggcggacatagcttgttgggcaacagatacgagttaccgcaatggtacgaatccattcaatgaccgataatcgaccttcggcaatgactttatcaccaagtggcgtaccagcaatcggtacaagtaaattaacaggaatggactgcggtggaatgggcatttgggtcagctcatacacccaatcaatacggtcttcacgactctcacccataccaacaatagaccctgaacaaacattaatacctgcatcacgcacatggctaatggttgccaaccgttcatcataagtgcgtgtgcttgttaccgtatcatagtaattgcgagaggtgtcaagattgtggttataataatcaaggcctgcatctgccaaagttttggcttgttctggctttagcatacctaaagtcatgcaagtctcaagtcccatggccttaacttcactgattaaatccaccaaataaggcatgtctttttcgctggggtgtttccaagctgcacccatacaaaagcgtgatgaaccttgtgatttggcacggcgagcagcggtaagcacttttttgatttctaaacgcttttcggcggtcagacctgttttatctcggtaatgacctgattgagaacagtagccacagtcttcagggcaattacccgttttgatagataatagcgtactaatttgtacttcattggcgttgaaatgctcacggtgtaccgtttgtgcttgcatcagcaaatccatcaaaggtagctcgaataagcgtgcgatttcttcctttgaaataagtatcttcattaatcaatctcgcttaaatttggtaaacaattgtactcaaaaatttgccaaatagcaaccgcatttcatgggcatgtctcatgcatctcaaagctgatggttttttaagtcaattatttggtcattttttgcttgatgccgtcaaaaaaacctttggtgcgtttggcgtatggcttaatggcatcaatatatccttgatattctttgggaatgctggcggcttgtttaccaatacctgcaagccaaagtaccaatttgtaatcacccgtgattttaacatcaccatcttgaatggcggtcattaatgctgcaacatcgcctttggtgaataattttgcacctgttagtgagtctttaaagtcaatcgtcaaatcaggatgatcagctttacctaaagcctgtccaaaatacccttgctcaaagcgaaaataacgctcaacattgggtgcggtaaattgaatgcacagcgatttatctttgataagctggttgaatgcttcattattgcgtgatttggcaaggttttgtaatcgcaaacccatgattgccaataatgcatctaaagggtcagtttttacatgaatgataggcaaggtaaacatgatatttccttaaatttttaaattaaattaattaaattaaattgtataaaacacaaatcaagattggtaatctagcctgtgacctaaggcataaatgacaccttcaagccctgtgatattaaccgcagccgatgccttggcttgcacaatcggcttggcatgataggcaatgccaaggtcgctatttgccatcatgggtaaatcattggcaccatcgccaatgcagatgacttgttgcatgggtaaccctaagcgttcagctacttttttgacgataagggctttttgatgaccgtctaaaatattatcatctaccatgcctgttaaggcattgccatcgtgaagtaaaggattggcataatattcatccatgccaagaacttggctgatgtgtttggcaaagggttcaaagccacctgaaatgagtactgtatgatagccaatggccttaagtgcacgcatggcagcaacagcacctggctgaatgtgaatgtgtttggcgataatctcatcaatactatctaaaggtatgccctctaaaagtgcaacacggtgggcaaaacttgtggcaaaatcaatctcaccacgcatggcttgttcagtaatgatagaaacttgctcttcgacaccacaaaattttgccaattcaacaatcacctcttcttcaatgagcgttgaatccatatcaaaacatgccaagcgatggcgtgtgagcattttgtctactgataaaatatggacatcagcacgaataacatttgataaataactggtgatttggtcatcaatgatatgtgccgccgcagttttgctgatttgacccatgtcatgctttggtgctaataaataacgatgaatattcactttggctaatgggtaatcgacactgatcagatgtgcgtgagccttggcaatattatcatcttcaacgatagacagttgccaatgagcttcggtatctacccagttttgcatcagagtatcaatatcagcttcttggcttgatagtgtcaccacaatgatagcaaataaaggcagttgtgatagttttgctgtgatatcattggcggtaaaatcataaccaatcacctcatttggcaaatgatgagcaacggtatttaaagcggtttgccatgcttggctattttttggtagagcataagtaaaagacatatcaaacctttggggcagctattatgattgaatagaattttacatattagcagttaatcaggtattttaaaagacttaaagcgaattttctaggtgcaagatgggtttaatccatcaaactgattttttaatttttaaaaaatactgagatagccacgatggtattgctcaaattttcattgataagctgataaaatcctgtcaagcccatagctattgaaataattaatgctataatactaggatttaatttttatgatttggcaactctcatgacatacttagcacccagacagggtatttttgcggcaatcgttttggcgagcttggttttgcatttattattttttgtcatcagcaccgagcgaggcatcagcacacaaaatcaacaggcggttgaacgcagtgttatgatgctaagtcaggaaatcgcagcaccactggcagcttatgatcgtgttagtatgagcgtcattgcagggccttatgttgatgagcctatgattgcttatgtgggtatttatgacagccaaggcggcgtattggtaccgcttggagaatcggcagaaggctatcgtgccgaagaggtggtgatatcaggggatcaggtgcttggcaaagtggttgtacaagccaaaacagtcagccgtgccaagattttgtcaggcaattgggtatttttattgagcgtgattgggctacatatcatcttgtggctgatttatggctatgtggcacgtccaaccgaggcacttaaatcccaaattgccaaagaagtgcgtaccgagctactttctaaaggtattttgcccgagcaaattacagacgaacctgcgacacacattcaatcaactgaagatgacgatgtggtatctgatgacgagataaccgcatcaacatcaaccgaaaaccaaagcaatccaagtcataccaagcttgaacttgctgctgcttataccgttcaagttcagttccaagatccgtacagcttattgacaacggtcagcattgagtctaaagatgcatattttgctttatgtgatcagttatttgaaagagcgtgtcatgcattgcttgagttgcctttatttgcaggcgtggcaatgattgaccaaaacccattcaccgagcaaggagcatcagtgacactttatgccacggatgatcatgccaaaacagcggcagcggcggcgctactttctcagcttttattgatggtcaatgaagtggtatatcaaaagcaccgtgaactaaaacgctttgccttacccatcaagaccgttaccagtgattcagaattgtcagatgttgccaaatccatcttaaccatccgcaaagaaaagtcactgattatttttgcagaggctgggcgtaatcaagccgccatgtatatgactttatccgccatcacgcacccaagtacggtacatgaacgagatagccgagaagttgttggaatgacgagcgccactgctgatcgactaaaaattgcacgagataaaacgctacttggtgatgataatgcttgacaaaatattcaattcgctttataaggctacagtaaagacctgatttttataaagcgtcaggtcgtatacaaatttcaacgcactgggagtcattatgagtaatattaatgatgattttgatgatgataattttgatgaagatgctgatgccattttggttgatgaaagtaagacaaaaccccttgaaaaacgcctaaaaattgatgctttgcttgaagagcagcgtctaaataagttaaagcgtgcgcttgaggatggtgatgactttaccgaatttgacgatttagatgatgatttagatgatgatttttaaactctaattttttaaaatctaaagattgttttggatataaattaagctgtcataatcacctttgggcgacaatatttgacccacaatagtaatgagtttgttatgaataaacaagaattgtttgagtatttagaatcatcagctaacgaaatgggcttagatccaatcgcagcccatggatttttgacagcgactgtggtgggcaagccactaccaaattggatatcggcattttttgaaggtgcagatgcgcaagtgccagatgaggtcaaatcagcactaaaggcatggcaacaagcgttggttgatactctaaaatcagagcaacccatcgagttgccctttgatgccagtgaagaggcggaagattttagtgaagatggcgacttggcagcatgggcaattggttttgttgatgcgatgtactcggatgaaaatgtggattggtttgatgatgcagcgaccgaagaagatgtggcgatgctaactttaccgatggtgttattatcaggcattgatgaagaaatggatgaaatgcgtgatgatgaaaccctagcccaaatggcaaatgcacttgaagataatatcacagagctgtttttattatttcacaccgatgactaagaactctttgactggtcaggcagggtggggacagctgtctttgccctgttttattatcttaagatgatgaaattactatgataaatctaagtcaatgcagagaatggtcatgcaattatcaaatttagaatacctgcctaaccatatcatcaccgaaagattggatgtggtttacggcaacactgtgcgtagtaaacatgtgggcaaagattttttgtcaggactaaaaaacatcgttggtggcgagctgactgcttacacagagcttcttgaagaagcacgccaagaagcggtgaatcgtatgattaccaaagcacaagtattaggcgctgatgcgattgtcggtattcgtttttcaacatcaaatatcaccgtagcgcatcagagctttttgtttatggtacggcggtcaaagtacaaaagaagtttgatccttttgggcaaagcttagatgagttccagtaggttgatttctgatgagccttgaagagttttttgataaaaagcctgatttggcttgttttggttaccactggttggtattttggtgcccgtgccgagcgtggtcatctaaaaagcttgatggcagatgagcaaaaataccagcacatccaagtctcaagtgagcgtttttatgaacccaaaggtatcaatgaatcaatcttggtggttggcagtgtcgtaattgctcaggataaattcaaacaggttgtagcggcgatgttaagcttatttggcaaaaatttaaccgtctatgagacgctgcttgaccgtgctcgccgagaagtggtgctgcgtgctaagcgtcaggcgaatgatgcaggctgtcatgcgttatatgggttaagatttgagatgaccgaggtgcaaggtggtgttgagatattggcttatggtgtggcagttaagtgatgcgtaagttcgcttaaattatcagaacactctgccaaacaattttttataatatcaagtggcaggcttttgaaattttgtagatgatattgggtctgagcgtgggtaaattttctttggtttagtgttatcgtttgattgagaattgaaaaccccttgaaattctaatttcaaggggtttatatttggtaggcgtaaacggactcgaaccatcgacccccaccatgtcaaggtggtgctctaaccaactgagctatacgcctgtataataggacgctattttaccaaattttttatagattgcaagcattttttatcattaatttcatttttttatttgaatactgataaatatcaatcggtgtcttaaatggatggtttggtcgctcttgaaccaatttaggaaccaaataacctggtaaggcttcaagcaactgccaatatagcccaacagcgtcatgaatatcgatgtcaaagtgcgccgccccttgaaccttatcaagtatgtgcagatagtagggtaggattccagcaccaaacagatcttgattaagcttacttaaagtctgaatgtcatcattgatgctggcaagtagcacactttgatttaataaagttgcacctgcatctttgagctgtttggttttagcgatcaattgatcatcaatttcattggggtgattgatgtgcagcacaatcacgatatttttttgataatgacgaatcagtgcaatgagctcatgatccacacggttaggtaataccacaggcaggcgagtgtgaagtcgcaccgtacgaatgtgaccaatggcagtaatcttatccaaccaaagcttaagtcgcttgttgtttaggctcaaaggatcgccaccgcttaagattacctcattaacttctgtgtgcttggtgatgtaatccatcacttcatccatttcatgcgtgcttggttgattggcatgataatcaaaatgctggcgaaaacagtagcgacaatgtaccgcacatgcacccgtcacggtcagcaggacacgagattgatatttatgcaataaacctttgatggggttgtgattattttcatccaaaggatcggtactatagccatcaacggtcatcctttctcgtccatcgggaagtacttggcgtaagagcgggtcatgaatatcgccttttttcatttttttgataaaggcgtgcggaactcgtaaaccaaactgcttgggcgtatgtgaatgagcctgttttggtaaatcaagcagcgtaaataaagtatccaaatcgctgaccgctgctgatagctcggcttgccaatcttgaaaatcatcagatgagtcagcgtgataaattttttttgtagaaatcatggttttattttgacaaaaattactaaaactttatataatgaagtgttacgctgcattatagcgtattttttagatgatgatttaaattttaactgagcgatgctctgattgacaactggcaggtaaataatggcaagtttttctacaaatgattttaaagcaggcttgaaagtgatgttggatgggaatccatgttccatccttgaaaatgaatatgtgaaaccaggtaaaggtcaagcttttaaccgtgttaagttgcgtaatctacgcacaggcaaagtgcttgagcagacttttaagtcaggcgattcacttgaaggtgctgatgtggtggatgtggaaatgaactatctatacaacgatggcgaattttggcattttatgcaccctgagacttttgagcaattgcaagcagataaaaccgcaatgggtgatgctgcacagtggctaaaagaaaattcaaatgcgttatgcactttgacgctatttaatggtgcgccgctgtcggtcacaccaccaaactttgtagagcttgaaatcgttgaaactgacccgggtgttcgtggtgatacctcaggtggtggtggtaagcctgcacgccttgaaacaggtgcaaccgtgcgtgtcccattgtttgttcagcaaaatgaagtggtgcgtgtagatacgcgtactggcgaatatcaaacacgcgtaaccgcctgattgatcgccatctgattaagcagtgttcttttgagcactgcttttttattgaaacagtcttgagatttaagcttggtacgcttattttgtgcaacatactttgtgtaatatcataaaaatttaatatcgctgacaaatcatcagataaaccaaacagaatgattgataatctacttatgacaagagatgacaaaaaacctgcataatgttaaactactatgacacattttgaaataattttgtcggttttgactgagaattataacgagaataattatgacaaaactctaccaaagaacggtagccaaagcaatcacagcaacaggtatcggactacatagcggcaaaaaagtgacactcactttgtcgcctgccaagcctaatacaggtatcatatttgaacgcaccgatattggtgcaacagttccaatggcagccgagcttgtacaagataccatgatgtcatctaatttggttttgggagatgctagaattggtacggttgagcatttattatcagccattgcggcttatgggcttgataatttaatcattcaagtggatgcagcagagattccgattatggatggttcggcggcaccttttttgtatctgattgatcaagcaggtatcactgagcaagatgaactcaaaaaattcattaaaataatttcaccgattgaagtaaatgatggtgacaaatgggcacgccttgagccttatgataagggctttttgctagattttgagattgattttaatcatgccgccatcgctgctactgaacaaacaacacagcttgattttaatactgcaaatttcgccgcagaagtggggcaggcgcgtacttttggctttctaaaagacatagaatatctgcaaaaaaataatttggcactgggcggtagcttggataatgctgtcgtacttgatgagaattctgtggtcaatcaagatggcttacgctatcccaatgaatttgtccgccataaaatgctagatgctgtgggtgatttatttgtgattggacaccctttacttgcgaagttttctgcttataaatcagggcatgcactgaataatgcactgatccgagaggtattagtggataaaagttgctatgaaattgtaacattttatgacaaaaaatcttgtccaattaattatgtagctgctgtttagctaaagtgtcattgagtaagcaaaggtcagaatattttaattatttggcaaggtttttgtaaggtaatagacacagtttggttttttgtatcatattgatgttaacctcacccaacacccaatcgtaagttacggattgggtgtatttttgagtttataaaaaaccaaactcctaaaaatacttattaagatggcagatacattgatgattttataaggattggtaaccaaaattttattaaataaaaccagctatctacacaaagttaatggatttaatttacaaaaaattacaaaaatagttggctatttgcgatttaaaacctaagtttatacaaaattttttcggataaactctttaaatttaattaataaaattattttttagaatcggtatttgtccttgcaagttgcgtcaaagcttgatttaagcgttcattttgtgtgacaaattgtgcggtctgtgttatcatttgtcttgtgttttcgcttaggatcttttttaaattatttgggcgagcgtctgattgcaccaattttggcgaagttgtctttgatgagacaatcagcttgattgattgtaactggcaaaaacgctgatcataagtgcgtaaagcttgaatacaactttccatcatatatcgtgcgtgattggcagcggttggcgaactcattgctagagcaatctccaccgatgagacattaaccacttggcaggctgacagtatctcattgggcaataaacctgcccatgcttgacgaattagctgtgtgtggtgttgcagatgatgataccgatgcaacaaatgttttggaatagcagcaccagcagccgcttgtttttcgatacggctggcaagatgattgggtcgacgaattttagtgaccaagtcattgatgggaatggtttttgtataatcagacatagcttacctaaataataaaaagatctatggacatggtgtccgcagagtaagtgtatcacgccttttgaggaaatggtaatctcaccttaataagatatcatttttctagcgtactaaggatgtatgctgtgtgccacaagctttaatcaaaaccaatcaaatgtatgccgatgaagtgatgcaatggggctaatcatccaccaactaacccatgggatgaacgctgtctgtgatagtaatgccaagcaagcttttgaagtatgaggaatctaaatgaaacgattattttggctactgtcagctgtcagtctgaccgttgcacaatcaagtgcggcacaaagtgcgtattcaaatagctctacccaaacctcttatgtggccagtatcccagacgatattgacagcgtcattaatgatttgatagcaaacagccaaaatgctcaagctcatgcttatcatcaacctaccagcacagccactatccaaaacttcagcaccaattttcaatcaccagtttctgcggtcgaacgcttgacggcaagcagtgctccaagtgtcgctgctgctgtggcatctcgtgctgcactgggtcggtcggtggggcggtgtgcgttatatgtgcgtaaagcattacaatctgcaggttatgaatttacaccgcagccttccgcttatcaatatgcacatggcacactggcaagtgcaggatttacaaaattgaataatagcaattatgtaccacaagttggtgatattgctgtatttaatcgtactgcaaaaaacccacacggtcacattcagatttatgacggcagccaatgggtatcagatttccgccagccaaaatttagcccatatagccagcataatggctacagtgtatggcgtgatgctcgttataatgatgcttctgcaaatacaggtattatgcttgctctaaacgaacaatagtctgtttattttggatatgacaaaagcccagttaagttaaactgggcttagttttttatttaaaataatgttaaatcattaatcaatagcttacaaccaacatgaacgctcatgaaaattaggcgggttggtatgcttaatggcgtaataaaccgcaacagatgctttgtggatgattgggtataaaatggccgttaaattaaattgacattcaccaagcttaagggcttggttgtgatgacgaatatgaaatgttaaaacataaccatcatcaagtacagcgatgtgtcgtatggataaagtatgctgagtgtctgccaaaggaggcatctgattgggcgtgcgatagccatcaaatcggtagatattatagcatccattgatggcaagatttgtctcaatatagtggcttgagtacttttgtgccaaaaaacattcaaagcattcagactgccataaataatcagcacgctgcattaagacatttttggtttgcttgtcaaaaatgtcttgggtgtaggcagttttttcaacaaaaaatcctacttcaacagcatcagtgatttgggcgatataggcgtatattttaggcggtactaatcgattatctggtctattatctagtctgacagtatcatcataagcgctactatcggtgatggctgttagctgataaataaaaaaatcatttggcaaaaaccgtttgactgtcgccgccatcgcctgatgtaatgttttaagactcaccgaaccgtttataatccaaatcgtgctaaattagatagcttgggattgggtttggcgttggtacgcagaagcagcaccatgcgtccgatatggtgaatgacctcagactcagtagcatcggcaatggcagctacatatgcttttctgtcatcagctgtaccagcagggattttgattttgatgagttcatgatcggttaatgcacgagcgacttcttcgatgacgctgggagtaacaccattaccaccaatggtgacaactggatttagatgatggccaatgcctcgcagggctttaatgtcttgtaattttgcgtttttattcataagtattccaaaattaccaatgataaatggtagtgatgaatgagtgagaaataattacgctattatagcagaatttcaccaaatttgttgtcaataatggtaaactagtcgattggattataaatgaatatgattaatttttatggcaacacgaattaaaaataaaaaattgtctaaatctagccgtgcttggatgaaagagcatattgatgacttttatgtgcaaaaagctcaaaaagaaggctatcgagcccgagctgcttataagcttcttgaaattaacgaaaaaacaggtctgattaaaaaaggtatgacagttgtggacttaggttcagcaccaggcagctggtcacaagtggcaggtcagcttgttggtgatgcaggcacactgattgcatcagatattttgccaatggatacccttgaaaatgtcatttttattcaaggcgattttcgtgaagaagccgtttttaaccaaattatgaacgaagttggtgggcgtgctgtggatgtggtattatcggatatggcaccaaatacctctggcatggctgcggtggatcagcctcgtatgatgtatttgtgcgaacttgcggtggattttgcgttgaaagtgttgccagtagggggcgcattgattatgaaggtgtttcaaggcgaaggctctcaagagctgcgtgctcagatgcaaaagcaatttagcaaaattaaaagcattaagcctgccgcctctcgcccacgctcaaaagagatgttttgggtggcaattaaataaatcaatcatagagtttacttgaaatagataaattcatcaatatattatatacaattaatcagcattgggtggattaatccccaatatccataagctaaggatgagaaaagtttgagcgacatggtgaagaataccttattgtggctggcgatcatcggtatcgtggttgtgatttttagcaatcttgatagcggtaaagctgatgccgatatgatgaattattcggcatttgtgaccgcagtgtcacaaggcgaaattaaagatgtaaaaatcagtggcgaagagattactggcactaaagtcaatggttctgaatttgagacagtacgccctgaaattactgacaatgaattgatgccactactgcgtgagcataatgttgaagttcaaggtacactacctgaacgccaaggcattggcatgcagcttctgatggcagcattcccaattctcttaattgtcggtttgttttggcttatcatgcgaggcatgagcggcggcggtgctggtggcggcatgggtggtcgtaacccaatgagttttggtaaatccaaagccaaaatgctgtcagaagatcaagtcaaggtgacttttgctgatgtggctggcgttgaagaatccaagcaggaagttgccgagattgttgatttcttaagagatccaagcaaatttactaagttgggtgcaacattcctcgtggtgttttaatggttggccctccagggacgggtaaaactttgctagccaaggcaatcgcaggtgaagccaaagtaccgttttttagtatctcaggttcagacttcgttgagatgtttgttggggtgggtgcaagccgtgtacgtgatatgtttgaacaagccaaaaaaaatgcaccttgcatcatctttattgatgagattgatgctgtgggtcgtcatcgtggttcaggcatgggcggtggtcatgatgagcgtgaacaaaccctaaaccaactgctggttgagatggatggctttgaaggtaatgatggcgtcattgtcattgctgctacaaaccgtgtcgatgttttagataaggcgttgtacgccctggtcgttttgaccgtcaagtctcagttggcttgcctgacatcaaaggccgtgagcaaattttgatggtgcatttaaaaaaattacctgcgaccatcggcgtggatatcaatgctttggcacgaggtacgcctggatttagcggtgctcagcttgccaatttagtcaatgaagccgccttatttgctgcccgccgaaataaagacagcgttgatatgcatgactttgaggatgccaaagataagctgtttatgggacctgaacgcaaatcgatggtacttcgtgaagaagaacgccgtgcaacagcgtaccatgaagcagggcatgcattggtggcagagctgttacctggtacggaccctgtacataaagttaccatcatgcctcgtggttgggctttgggtgtgacttggcaattgcctgaacaagatgcgatcagcaattataaagataaaatgcttaatgaaatctccattttgtttggtgggcgtatcgccgaagaaatctttgtaaaccgcaaatcaactggcgcatctaatgactttgagcgcgctaccaagcttgcccgtgccatggtaactcgctacggcatgtcagatgagttgggggtgatggtctatgaagcagaagagcatggcggttattttggcggcagcacccgcacaatctcagaggcaacacagcaaaaagttgatgacgaaattcgccatatcttggaagctcagtatggtgttgcttatcagctcattgatgaaaatcatgacaaaatgcatgccatggttgaagcacttatgaagtgggaaaccatcgatcgtgagcagctattacaaattatggcaggtgagacacctcgtgaacccaagaactatcagcacatcgtgcagacacctgtggcagccgaagaacctgccgatgacgatactttaccgccgccattgccagtgtgatagcctgattaaaatcatgagcaaaatctccaaagtatctgctttggagattttttatacacattttttattttgaacttagtttataaatgttcaccaaagtacttgattttttttgcgtttgggtttagtctgtatggcaaagaaatgcattgagttataatatgtcaaatttcattagcgatcnntaaaaaagtactaaagcagcatttggattgacaaatactttattaaatg

SEQ ID NO: 19 - DNA, 33778 bp, Moraxella catarrhalis
  unsure 33771: a or g or c or t, unknown, or other
gctcaaaaggagataccctgcttgaaggcacgcactttgagtacctcaaaggcgcacagatcagtgccggcggcaaaattcggctattggcagccttaagtgagctacaaaccgccactcaacgagaggacaattgggtcgtatggcagcgcacccaaggcgaaggtcaacacactcagacagcccaactgccaagctttacaggtacagcagcccccatgtttgaagctcaaggtggtctaaatatccaaatccccatatctgaaaaagatgttcaaaaaagacagctcaaagatgaaatcatcacccttgccagtcaaccacagtacagctatctaaacgatctggtgaatcgcaatgatgttgattggcagcaaatcatcctaaccgacaaagattgggattataagcagcaaggactgacccctgctggtgctgcgattgtggcgattgcggtggcttatgcgacaggtggcgtaggtacagctctgacaagtactgttgcaacagcaacaggcagtaccaccctaggcaccatgacaagtgctgcctttagctcattggtaacacaagccagcatcagcctaatcgataaccaaggcaacatcaagcaaacactcaaagacttaggtagtaaacaaaacatcaagcaaatgacctttgccattgccagcgctgggattggtagcaaaattaaccaaacactctcaaaaagtcttagtgtgggtgatatagccaactctcacaattttagccataaaatcagcaaaggtatcgctaatgccacttcaactgcgctgcttgaaagtaccatatatggtaccagtcttgaaaagtcattaattaaaaatctgcgtggtgaagttgccaatgctgtcgccagtgaggtctttaccgattatgtcaaaccactggataaagataccctaatagataacattacccataaacttgccgcaggtttaacaggctgtctatctgccaaagcggcaggaaatcgttgtgaagcaggcagcattggtgctgtcgttggtgagatgtggggtgattatcaagtagatgactcaaacaccctaacccaagcacaaaaagacaaactcatcaatcaagccaaactgattgcaggcatcaccgctgcctttgctggtgaagatgtcaatgtggctgctggtgtggcagcggaggcggtggagaataatacttttgcagagatatatcccaatgaatgggttgaaatcgtaaataatactgacggctcttatggtcttgagttgcatgaagccatcagtcgtaacaagcagtacatcttaatcggtactagctttattcctgttgtcggtgatatccaaggatttgttgaggccaaaactgctggcgattatgtttttgcaaccataggtcttatacctggtttgggggatgtagctcaaaaagctcataaagcaaaaaaagcctatgatactgccaaatccgccaatgatgtgaagggcatgaaaagtgccattcaagagggtgtggatgttttaaaacaaaatcaaggcaaggcaggcaccccttgtcgtcagccaaccaatctcaggtgttcaagcacaaagacagatacgaagtggtcaagcaaatatagctggctacactatagacaaaaatggtaggttgcacaataaccgtggacagtttacttctgacccaaataatcctagggtatcaaccaatctaatccgcccaaacttaagagctgaattaagaaggcaagttgatgctaattacattagactaccaaatggtgattatgtacacagagacggtacagtggtaagaacacctgttcaatacggccatacctatggacgtgaacacagacggcttgttctggcagctgagcaaacaggtctaacccaaactcaatttaatgactttattaattctcgtcctgattatttcagacttgaaaacgcatcggataatatgggtcatcgcaatgagaaacctgacagtgatgatttgggtgaaatcattagacatataaatcaatttaaacgcaaaagaggtattaaataatgagttatgatatgagcggtgtggaaattttagatgcattatgtttaggcaatattactcttgctgaaaatttattaaaacaacacccacaacacaacttactcgctgtcaatagcgataaaaaaaattggcttcacaaagtcacggattctatgaatcctgatgagccaccacctgtcaccatcagctatcttatcaaccaaggcattcctatcaacgcccaagatgtttatggtatgaccccattacactatgccatgcgttcaaagaatgctgatgctgctatcgccttgctggaggcaggggctgaccctaatattcctaatagagacaatgtcatacccttggcaatgataggtatgataccaaagcgattagatgtacttgaactgatgctcaaaaaaggtggtaatgttcatttttataatggtcattatgaagtgttacaattattagagttgttttggagtcatgacaaagattatatccctgttattgaaatgatgaaacagtacgcttgaaaaccttttaaagactaatacacaaacacccataccctaaatgctgtcaaactgattgcaggcatcaccgctgtctttgctggtgaagatgtcaatgtggcggcagaggtggtgaggtggaatcatctttcaagaggtattcttgggcttggctcagatgaagataaagagtttgtagaagaatatatcaaatactgtggctcaggcccagccactagctgtagcaccatcatgcaaaaatggaaacaggttagctataaaaagaatgctggtctaaatgatgtgcagattcaagattgggaatcaagtgttaatcaaatatacaaacattatataggatattgcaaaaataccgatgcatcttgtaatgctatattaagaatggccaaagactattacatggtttcttatggtggcatgaaggagatgctaatccaaatggaattaagcatgtacacctaccttaatggcggtgtagcagcaatcaaaaaccaaacaattccatatattgctgaaggtgtaaatggtgttgtaaatttaggaaagcctagaacaaatggtggagctcaagttcagagggctacaaatgacgctgctcgaaaaagacgagagttctatattcgttatagcccaaattggtcttcgggaagcttcaaggcttcttatagaaaattaacacctgacgcaaaaggaaaagtgagtgatgatagggtaaaaaccagatatatcagctccgatggtagatacaccataatcaaagataatgaaaataactattatcggatatatgataatagcagaggtcagtatcttgatagcaatggcaatattgtctcaactggacatttacaaggcaaagatgccaaagattatgttcagcaaaaaacccatattaggaatttagataatgagtaataccagattatatccagtattttgtcttgagaggaatatagaaattaatgatcttcctaaaatgattgactgggcatatgcaaatgcaggtagtcaaactgttgttattctaaatgaggaggaggttcggtattatgaaagcacggggctgtgggggataatatcggaagaaacagataattggctgtttggattacatgaggatgactggatttttgatttcgatattatgcaaaacattattaatgccatcaatagcaagtatattaagatagaccagacggttggcaaaatattattcatattggattatgctattgcaaatcaaaaatcagtggtgttttatttgtgatgaagcatggtagataccatctctcccaccccaagcccatgtaggctgggctcagtgaaacgaaaacctaacaaatatttgttaaaaatcatcatgttgggttacactctcgctaacccaacctaagagctcaaaacatcttcaaagatatcatccatgacatcgatggtgatacactagcacgcaacctctctcacaaacttgctgttggcatgacaagctgtctatctgccaaagcagcaggaaatcgttgtgaagcaggcagcatcggtgctgtcgttggtgagatgtggggtgattttagggttgatgatccaaacacattaaccgataagcaaaaagaagctgtcatcaatcaagccaaactgattgcaggcatcaccgctgtctttgctggtgaagatgtcaatgtggctgctggtgtggcagcggaggcggtgaggtggaatggtacagctcaaattttttattataatgagcttgaggaaataaaaaatgatatagatggcacttatgtaaaggagcaactcaatcttatcaaaaacattccaaatgctgtggcacaggtcgttaaagataatgatatgactatcatcagctttaacatgggtatggttggttatactgccatcgttaacaataagaatggtaatgtatggataacaggcgttgaaaaagaaactttaggaggtcaggtaagctatagagcagttcctgaagttggtattaatcttaattttaaagaaattaccaagggtattcaaggatcgtctcgctcccctgctagagcaacaagaatggtaaatgcaggtatatcaattaactttggcaatattcgaggaaaaatggaagctactgacattgatccgggctataaaaggcagttctgttggcattcagacttgttatggtgtctgcggtggtgcaatcagaacaagtggtggacaaactatcttaacttatggtgctggcacgccacaaataggtattacaggcggcaacatggttcagctttcagaagaaaagaaacaagagctttttaaaatactggaggttaaacaatgaataagttgttggataaaactacaggtttcctaacatccataatattaattatttttttaacattcttactattaatgtatttgtctggaaatatgtcttttaagaaaggtgtttatgataaaagggtagatcgaccaacgatggcggaaattgatactttattgaatgagttgacggatggtattacatcgccaaaagatgaatttgtagtaagcaaaataggtgttgtatataagcgttaccgatatgactatctaagcgatcaagaaaagttatatctaaatggtagaataaatgactcatccaaatggattaaatataatgatggaaaagatggaaatagggatagcttttattattgttacaatcaatttgaactaatttttaccaaaggtgtagaacctagtgttaataataagaaatctttagataatgctttttctgtgagtatcggatggcaggatactcatagcgtatgtcgtaggaaatttttagctcgcagcccgtagccaaacttaacatttggctcttaatcttcaatttgttggatattgctgtctttctgtctgacctaaagacagcattgcaactaagaactgaactgacctttaagcaagctggtattttagatgataatggaaaactcactactactgcgattgaaaattcaagaaaaatttctctttctagtggggttattgaaaattcaaaagttataagaatcttaacaaaggatggttcaaaaattgaagattggaacaaatacactacaaaatctgttgttatgcccatggtcaatctatgcaaatccatttttatgtgaatacaaaaactggcaaaaattgattatgaaacgaaagactttaaggttaaaggagtggtagaaccatgattgtacagtttattgctagaaacaaccaatataatggttggttaataaaagataagttatatattgttttagatatctattttaatttttataataaaaaaatagagattgttgtaaaaagcgaagataaccacacaccatgtgtatttgatttgagtgattttgagataattaactcagatttgccacaaaattggaattttattttacataataatgggagtgtttcattaagaccaaaagaatttttaaatgaattttgggatgggtttcatgatggaaatcctgaatatgaaaaaatattttgggatgtttatcgtaagttagaagaattttattcaaccaagagaaataactattggtaggaataaggggttattatatgcagtaaaaactgaaaatggtagttataatttgaggagtgtagcaagtagccagagtcgaacaggtcttgtttggacgattgatattcccaaatctgccacaggaacgaccaaaaacccagaaattaaatttttaaggtgataactatgatttatatatctgaaaaggttaaaaaagagatgcttgaaacttcaaaaaatctatggttatcagcactattcagtgctgtttcgagctattgtgttggcataaactttgagcaacacaaagagatattctttcagcttatcaaagaagccttagacgcagacttaatcaaatttataccacctaatggtatttggtatgaaggatatgacatttgggatgtctcatcagatgaaatcgttgcctatcttagagataattttcctaaagatgcgacagatgaacttgatgaagatgtaaatttgtatttttatatcactgctccagctgtcctatggcgtcaagatgatggcagttattatggcagttaaatcaattccctaacacccaagtcactgttggcagtgatttgattgttaaaagctgtcaagacacttatcaatacactcatgatcaaaaacaagcaggatttagtgccgatgttggttttgatggcaaaccccaaagctttagtatcaatggtggcaaaacggatgtagatgccgattatgcccaagtcaccgaccaaaccgttatcaaagccaatcaatccatcctgtctgtacaaggacaaggtaagttcactggtggctatctcatcaccgatgcaggtaaaaaccaaacccaatttgcccaaggcatccaaacccaagacatacaaaatcatctaaattatgaaggcgatgccatcagtgtcggcattggcattggtgcagacaccagccatccaaatggcaaagccaaacctgccctacaaggcttaggctatggtataataaccccagctcataaaaccagtaccacccattctgccatcactgaccaaataggtctctcccatatcaacacaaaaaatttcaaacaaaaagaagttcaacatgagcttaacccaatcatcaccaatgactttaaccaagagcaggtgttaacagagcttggggctcaggtggtgattaccgcagagtctggcagagaagcaccaaaggcagtggcaaagtttgctgacaggcaagcttttaaactcattcaaaacctagatgaacttaataacaaaaacattgatattacctctgatgagtatcaaaataccatcaaagagattgataaatggagtgaaggtggcatctaccgtgttgctttgcatactgcagtcgctgccctagctacaggcactgctcagggtggactatcagcaggcataaccgcttataccatcccaaagattgatgagtatctaaaagaacaaggctttgacaaagaaatcagagacatcactctacttgccctatcagcaggcattggtgcgactgttggtagtgatactgcaagtactgctaacaatgtggggcaggtgcagtggaattatttgacgcatcgtcagctacaggacaaaatctcgtgtactagtactaaaaaggagtgcgaagatacgatgatatatcaaaaaaacaagatgaagaattgcgtacaacctgtactaatcaatcaaatagtaatgattgccatcatatgataagagaggtcttgagttatgtaggaaaaaatagaaatcattatggaaaagcaagcgacatcaaaacatctacttagaatgttttatcggtcgctaattctagtggctatcataccattgatacccttgatgaaagagcaaattattttggagcaatgtatagttatacagagcaaccttggtttagggtggcgtttattttatcgttatccagttgctaatattgcaaaaaatctacttaattttatgaatataactaaattaatatcattaagattgaaaacctaaattaaataatccatctggctatttacccaattattcattataataaaaacactgtattacacctgtaatattacagatattatctcattggtttagtttagggtgtaagtaatctcataatagctcgtaaaatgctctgtattggtttatacgggctatttatcgcttgggtggtatgctagtaacagttaagtataaacatggcttaaaacgcattatatgagcatatatgggtatatgctgaattgaaggagtatttttagatggcttgggtacagattagtgaagaagaagctaaaaatcacccatattgggataagttttgttgggtaaggtggttatttattattatgggtatgctaaaggctggtttattagtgcctatcactatattgagtatctatataatggacctgaaccttgataaagggtatagtattgtaggtatttttatgattttaagtgttgttatgctactgatactatggaccgtgattattttattatttggttttaagcgtcaatataataaacacttaccttttttagcgttgatttatatacccagcattctttattcagttgctcctattatactcatatttggtcctgaaaccaaggatattgctactgcggacggctctataatgggactaatgactataacaatggttttatttatctactttggtatttatagtatttataaacttatagcagagaattcagaagtatttagattacagtatatgaaacagattaaatttactcagtattataataattattataaataaatataccctataaataatatacccaatctgatatgactgatatgccaacgacatagccaaagtactcaactaactgggctgaccatcccatcagagcaatcatcatggatatggtcagcggtggttgattaagcctgtagtttttggattaaccgcttggcagtatcttcagatgaagcagggttttgacccgtgattaacaggccatcttctaccacatacgattgccaatcagcaactttttcatatttgcccccattttcttttagcacatcttctaacaagaacggaacgacatctaacagaccgacggcttgttcttcagaattgctaaagccagtcacttttttatctttaacaaaatattcgccatcaattttcacatttttgagtgcggcgggtgcatgacaaacaaaagccactggcttatcggtcttcacaaaatcttgaatcaatgagatggattgctcatcaactgccaaatcccacattgggccatgaccgcctggatagaatactgcgtcataatcggcagccttaatatcagccagtttatgagtggttgccaactgttctttggcggcggcatcttgcttaaatcgttcagtaaattcggtctgagcgtctggctcatcactttttggatcaagcggtggttgaccgccagcgggggacgctaaggtaatgtcagcaccagcatctttaaacgcataatatggcgaagcaaattcctccaaccaaaaacccgtttttttaccagtgtctccaagattttcgtgtgaggttaataccattaaaattttcatcatttacccttattatctataagatgttgtctatatgatttattgcaaattgtgtgatgatttgtgttgttttaggttgttaattttaattacagtaaacctcctttttacctattgacattgatatttttatataaatttattaatatattattataaataaaatttaataaattagtcattccgtggtatcgggtaagagcatctcacccataaaattatgattatcatacccctttatgaggcaagcgtctagtatctttacataattactaacgacggttagcatttaagatgggcgatctaaattaaagataatcattggtcgcaaatatcaagattttatccgataactgtgatcaatggcaggcatgttagtcgcttatcggcactcaccttgataatccgttacccacttttacaatatttataacgctgaacattgtaatatgtgtcttggtcgtataaaatgacagattaattatttatactcacttaaataaattttatacaagatcaaaggacatcgcgtgatgatcattcaagagatgctgcagctgctgaccactcgctctgagtattccatgcgactgtttgttgagcatatgatgattcgcggtatagcggcaagctgtgcgatcgtgactggagttgggcttggtgtgctaatcaccgaacatcagaagtttgcaccgtttgtcattcaagcaagtaatatcatttataccatcccaagcatttctttatttggcttattgattttggtgagtggtattggtaatacctcagcaatcattgcactggtaatttatgcactgttaccgatgattaatggcacacgcacagggcttcggcagattgatacgggattgatagaagctgccgagtcctttggcatgacacgctggcagattttacgccgcattaagctgcctttggcattaccgattattttatcagccattcgtacgatgctggtgatgaccattgcactggcgggggttgcatcttttattggtgcaggtgggcttggtgtggcggtatatcgtggtatcaccaccaatagcaccgccatgaccgcagtcggtagtattttgatcatgcttattgcgtttttggctgactttgttctggcgtattttgaaaaatcaatcaaatggagaaaatctcatgcttaaaaaatctgttctgctacttatgagcgttctatctattggtcgcctgccaaagccaagatgataaaattcgcattgccaccaagcccatgaccgaacaattcatcatcgctgaaatgcttgccatactcatcgagcaagaaactggcacaaccgttgaaattaccaaaggtatcggtgggggtacagcaaatatccatcctgccatgcttaaaggtgagtttgatttgtatccagaatacacaggtacggcatggctgtatgtcctaaaaaatgagccaatcttcgatcaagccgtgcttttagaaaatcttaaaaaaagctatcaagatcaatataactttcgctgggtgggtatgtatggctttgataataccttcggcttggcggtgcgttctgactatgccgatgtcaatcaaattgccacttttagtcagcttgcacccgttagcccaaatcttacttttggtgctgagtatgatttttttgagcgtgatgatggctaccaagcgttaagcgatacttacggttatcattttaagaataccaaagatttagatatcggtctaaaataccaagcacttaataacagtcaaattgatgtcgtcagtatctcaaccaccgatggcgctctcgccaacccaaatctgaaagtgctaacagatgataaggcattttatacccattatcatgcaggcacggtcgtcagacaagaagcactacaaaagtacccaaaacttgagtctgcactcatgaaaatggacgggctaatttcagaacaggagatggcacaattaaatgacttggtagaaaatcaaggtcacaatgaaagaaaagtggcacaagattttttgcgtaaaaaatccttgttggcatcttaagccatttaaacagtgatggtttgatatgtcataatctgatgaatgaccatcgcctattggctggcgggttattttaaattgtgtttgaaaaattatgttaatcactcagttgtgttaattgatggcatgtatcatatttgattgagatgtatatcaaatcatcagcagtttttggtcaacaaaagaaaaatagggcagatgagccaaatatggtgaatggataaacaacaaacaaataaagtctgtttttgtttttacattgttttgaaatacctagtgcttgggttgttttgtgatgatcatcatcagatgaccagattacatgctaccaaaccccatacgattttcgatggcttgggcaagtttgacgagtgcatcgccaatttgtacttttttgtcatcatattcactattagatagtgatactgcgatgccaagcttaactttatctggactttgaatgtaggtaccaatacaggtcataccaagtcgcaattgcccatcatcaagcgatagtcgtgtctgcttgatgtgaagaaattcatcttttagctgattaaaatcagtcaccccacgctcggtcaatggtaatgattggtactttatgcagtacgccttttgcactcagtgcttgtagaatattataagttgttgagcgagccagcttaagctctttggtgatggtggcagcagagacaggagaagcactttgggtgattttgtattccaaaatatttagtgctatattgtataatatcaagaacttatgttcaatatatagaatataaattttaatatatcatatacaatttttttaataattttaagtcatttttatcagtaaaaaggatacgctatgaaccaacctacaaatcaatctacgacccaaccctcatcgattccgcttaactgccccaatctgctaaagcaagcctgtttgattgatggagagtgggttggtgctgattctggtgagaccatcgcagttaccaatccattcacaggcgatgtgcttggtacgatacctagcttatcaaaacaaaccgttctaaacgccgttgagtgtgctgatgctgcccaagaaagctgggcaaataccaccgccagtgagcgtgccaaacttttgcatgcttgggcggatctgatcgatacacacaaggaagatttggcactgatcatgacctatgagcaaggcaagcccatcacagaatcacaaggtgagattgattatgccaatagcttcatacgctggtttgcagatgaaggcaaacgcatctatggcgatgttattccaagtaccaatcagtcgctacgctatgtggtactcaagcagccagtcggtgtgtgtgctgcgattacgccttggaatttcccttcggcaatgattgctcgtaaagctgcacctgcgttagcggctggctgtaccatgatcatcaagccagcggttgagacgccattttcggcattggcactgggatatttggcaaaacaagcaggtattcctaaaggtgtgttacaaattgttactggtaaatcctctgtggtcggcgaggtactgaccaaagatccacgcattcataagctgtcattcacaggttctaccgaagtggggcgagtactgatggagcaatgtgcaagcaccatcaaaaagctgtctatggagcttggcggtaatgcaccttttatcgtctttgatgatgccgatcttgaaaaggcggcagaagggctgattgcttcaaaatatcgaaacgctgggcaaacttgtgtgtgtgccaaccgtatctatgtccaaagttcaattaaagatgagtttttagcgaaatttaaacaaaaagtagaagtactgaaagttggcaatggtgctgatgaagcaaccgatatcggaccgcttatcaatcaacaagcactcaaaaaagtgcaggcacttttggatgatgcgctaaacaaaggggcaacgctaatcacaggtggcgtgccacatgacgcaagccaactgtcatttaccccaactgtcatcagtgatatcaccgatgagatggatcttgcccatgaagagatatttggtccgattgctccgatcatgacttttgaagatgaaaaagaggtaatccatcgtgccaatgataccatttatggattggcggcgtatttttatacccaaagccatgctcgtgcttggcgtgtttcagaggcactagagtatggtatggttggtcaaaatacagggcttttatcaactgaagttgcaccatttggtggtgttaagcaatcaggttttgggcgagagggttcaaaatacggtattgaagagtatattactaccaaatattggtgtatggatatcagcgaataaaccttaatcataaaaaagcagtacaaaaggtactgcttttttatgagcttttgatgactgatgatggttttatttggcgaataaaaataacaatcgccaagcaaatttaacttggcgatcggttggataagatgggtgatgttagccaatcataccaaaaaattgtaataagaataatacggtaaagcctgtcaaaaatacaatgcctgccagtgcataccatttcatgatggtgcttagatgaccttcttttttgaccaaagcgtagtttaaataagcaaaaatcggtgcagtcacaaatgctgagatcatcgcaaatttgagcagtgccgccatttgacctagaaaaaatgcgattaaaccgtagcctgccacaatcgtaaatacagtccatataacaacatatttttcggttgcttttgtgctgttggtcaaaattaaggataggctttctgaattggtacgaccatagccatcagcacaggtgatgactgtaccatacatgcacaaaaaagcaatcgtggcgaccagcatttttgcccagttgccgatggtttcggtatacatattaatcagctgtggcacataagcaccgccttgcatggcgatttcggtgcctgtgccatattgtacaaatacgccaagtgccaagaaaaatattgccaaaaccgctgaagtaaaataaccaacattaaaatcaacaaaaccttgaaagcgattggtgtaatcggtacgaattttcttagcggtccacactgaggtcacggcagaaaattcaagtggtgctggcatccagcccataagtgcaacaataaatccaagtgccgccaaattccaaggtgaggcaggaataaagtcggctgatatggcagagggcttacctgcagcgataaatacagctgcaaccgtcgctactgtcagcagggcgataatccacttggttaaaccatctaaaagccgataatgacctgccaccaataaaatgcctgaggttaccatcacaatacatgaaagctctagagtgctgagttcccaaggcaaaatttgccccaaaatgaccgcacatagtagtgccacagcacctgtgctaataatacctgaaatgatgcataagacaaaaaatgcccaaagatagatacgggaaattttagcataacctgccactaagctgctgcctgttgagtaggcatattctgttccaaagcgataaaaagggtatttaaaaaaattggcaaggataatcataattgccaattgccagccatacagagcaccagcttgtgttgaggcgaccaaatgtgagccgccgatggcagcagaagccattaaaataccaggtccaaatgaacgccaagttaatttatggctttggtttaaggtgatatcggtcataattcatactcaaaaaaaatttcaaacatcgcagtggctgtattttatgaagccctaccatattgtatcagtactgtaaagattgcttgataaaagatgataatttgtgacagattagcataataaagtatgatgaaacaaccaaatttaaggaataagctttataaccattcaacgatactgataaaacggtgcaaaaacccaaaaagtatggcaaaataactgatttaacaaacagttagttgatttaaatttatgaaagaatccttacgccaccgtctagatcaaatggttgatcgttttgaagaggttaccgcacttttgtcagatcctgataccatcagtgataacaaaaaatttcgtgagttatccatggagcatagcgacctgtctgagattaccactacttggcaggactttgtgcaagcggaagcagacttacaaactgccaatgagcttttgagcgatcctgagatgaaagaaatggcacttgatgaaattgaggggcgcgtgcaaacattgagacgctcgaggagaggcttaatgtgatgatgctgcctaaagatcctaatgataaagcgacggcatttttggagattcgtgcaggcacgggcggtgatgaagcggcaattttttcgggtgatttgtttcgtatgtatcaaaaatatacacaatcccaaggttggcaagtagaggtattgtctgccaatgaaggagagcatggcggctataaagaaatcatcgcgcgtgtatctggtatcggtgtttatggcagattgaaatttgaaagtggtgctcatcgtgtccagcgagttccagccactgaatctcaagggcgtgtacatacctcagcgtgtacagttgcggtgatgccagaggttgagattgatgatacggttgagattaacccaagtgatttgcggattgatacctatcgctcaagtggtgcaggggggcagcatgtcaatacaactgactcagcagtccgcatcacacatatcccaacaggggtggtggctgaatgccaacaagaacgctctcagcatgccaataaagaaaaagcgatgaaaatgctggtagctcgcattcaacaagccaaagttcaagcccaaattgatgcaacaagcgatatgcgacgcaatttggtcggttcaggcgatcgttcagagagaattcgtacttataatttcccccaaggacgcatgacagaccaccgcattaacctaactttatataagcttgatgccatcatggaaggggatttgactgagcttttagacagcttattgcgtgaacatcatgctgatttgatggcaagtgttggagcagagtaattttagggtaattattttgtgtcaattaccctaggattaccctaaatggtacttaaaaatatccctaagattagtcaggtaagtattaaaaatagctaaataagtttatcagctatgatgtaagttcggataagtgcaataacagggtgtacataacctaaaataatgagtactttttgtatataacgctccttagtgttaaataaatgttgtgtagtatttaaggtaaagcaccttaatggtgctttagtataatttaattatgggttaaaaagttattactgtcttaatccaaaaaatccaagccaatatcatgattgatcacactgtgggtcagatagcccaaagcgatataatcaacaccgcaatcggctacagtttttagtcgctcaaaggtaataccacctgatgcctctgtttttgctctgccttggcaaagtgatacggcgtgctttagggtatcgttatccatattatcaagcaaaacaaagtccgcgccagcctccaaggcatcttcaagctgtgcgatggtatccacttcaacctcaatggggataagatgacctgcagctgctttggcgttggcgatggtctgtttaagcgtacctgaataaatcaagtgattatccttaattaagatcgcatcatctagccccattcgatgattgcagccgccacctgctcgcacagcgtatttttgtagatttcttaaaagtggtgtggttttgcgtgtgcaggtaattttggcttgtgtgtgtgatatttgggcgactgctttggcggtcatgctggcgataccgcttagatgtgtcaaaaaatttagtgctgttctttcagcttgtaataaggcttgggtattgcccgatacataagccaacacttgacctgatttgatagtatccccatctgaggcatttgggctaaagttgattgttttatcaatacattcaaaagccaaccttgccaaatccatgcctgccaaaatgcctgtatcacggcttacgatggcaagatttgcggtgctatttttggcaatgaccgcagccgaggtaacatcaccacgccgccccaaatcctctaaaagtgctgcttggactgtgggtattagtagggcatcaggcaatgcaaataatggcgttttcatgaatttatccttatcttattaatcattatcttaaattatttatcttgaatcatttactcacgggcaggcgagtgttagataacaaacgctcaagcagcaccgtgtctttaaatcggtaaagctgtgcaggccgaccacgctcatgagcaaacctgccttcaatggcttctatcaggttttgctgctgaacttgcctgcgaaaattttgtttatgcagttcttgacctgataaggcttcgacgcttttttgaagctgaaataatgtaaactcatctgccatcaattcaaaaataacagggcggtattttatcttggcacgcaatctggcgagtgccgtggctagtactcggcgatggctatgctgcataaaacgaccggtatgacgaaaatcaaaatttgggttttgccaaggcgattcggcaaccaaccctgtttcatacaataattcatagcgtagtagtacctgctcttctgaccacgaataaggaggtaaaccccagcataattgaacccgtcttagccgttcttggcgttcttgggtatcgttgccagcatccacccaagcatacagacctgacaaaatctcaatgggcttactgctattacgccgatcttcccatggaaaataatcataccaatcttgccaagtggcatcaggattgagactgtgggcagtcgcttctttaaccaacccaaggtagctgacatacaaaacgggcataccttgtgcgtttttacgctcaccatctacaaaagtatacagctgttccacataacccattggctgagcggtttgggtgcgtacccagtctttaacaccagcttgtagtgaatgatgaatgggtgtcagctgaccgctgggcaacttatcaccgccgctgaccgttaagatacgagctttatgatcagtaacagcagccaaaaccgttacaagatcgaccaagccgtcagtttgttggggagtattggttgatgaatgtatgctcataattcacagtcattgaaaaatcatcattttaaaaaaaatcttactaattttcaatgtacttttgataaccagattgattaaaaagcgatattctatcaaaaactgctttacattatactcaaaatgagcataatatgtcaaattaatactcaaaatgagcataaatcatctgagtaatcatttaagctgatgcaaaaaggagcatgtgatgcacaaaaatacccaacaagcgtttgattatgaagcgcctttatcaaatatgccaacgacatcatgtcgcatcaagcaagcatgggcaaagattccgcctgagctaccaaaagacgcactgacccaataccaacgcaatattaaggatctgcttatccaaaaagatgcggtgattattgcacattattatgttgatcctgacattcaagatttggcattggcgacaggtggctgtgttggggattcgcttgagatggctaagtttggggcggcgcatgatgccaagaccttattggtcgcaggggttcgttttatgggtgagagtgccaaaatattaagtccgcacaaaactgtcttaatgcctgatttacaggctgaatgttcgttggatttgggttgtccaattgaggaatttagtgcattttgtgatgcacaccctgatagaacagtggttgtctatgccaataccagtgccgctgtcaaagcgcgtgctgattgggtggtaacttcgtcggtcgcacttgaaattgtcagtcatttacatgccaaaggggaaaagatcatttggggtcctgatcgtcatttgggcgagtacattcgccaaaaaacaggggcggatatgattttatggcaaggatcttgcattgtgcataatgaatttaaatcaatagagcttgagcagcttaagagtgaacatcctgaagcgatcactttagtacatccagagtcccctgccagtgtggtcgctcaaggagatgtggtcggttctaccagtaagctattacaagctgccattcatcgtcccgaaaaaactttcatcgttgcaaccgatttggggattttgcatgaaatgaaaaagcatgcaccacaaaaaactttcattgcagcaccgacagcgggcaatagtgcaacttgtaaaagctgtgcattttgcccttggatggctatgaatggtgtccaaggggtttatcaagcgcttaaatatggcacaggtgaaattcagctgactgagtctttgatgaatgatgcacgccatgcgttggataaaatgattgaattttcaaaaacattgcccaagaaaccagcggttcatggtttgggagttgcataaatgaaaccagcttcttatgatgtgatcattgttggtagcggattggctgccattaccacagcgttatctttgccaaaagattgccaagttttattaatatgcaaaggtgaaattgcggatacatcaagccgctttgcccaaggtggtatcgctgcggtgatagcaccaaccgacagcgttcaggagcatgtgacagatacgctcattgcaggtgcagggctgtgcgatcccaacacaaccgagcaaatcattcatcaaggtgcagatgcgattgcttggcttagttctttggcagtgccttttagtacaaccaaagagggtttacacctaaccaaagaaggtggacacaatagacgccgcatttgccatgtcgctgatcatacaggtcaatcagtcatggcgtgcctttgggcaaacatgcagactcgcccaaatatccatgtgcttgagcggtgttttgtgacagacattttgactgagcttgatgtaaagacaaaaaaagtgcattgtaaaggtgtggtatgtctcatcaatcaacaatccaaaaaatatgatgccgataaagtagtgcttgccactggcggcttagggcagatttatcaatataccacagcgccagaggtgtgtactggtgatggtattgctatggcgtaccgagcaggttgccgcattgtgaatgctgaatttgttcaatttcacccaacaggttttgatgatgatatggctcaaacagcactgatctcagaagcggttagaggcgagggtgggcggctcattaatgctcaaggcgaacgctttatgtcaaattatgatgagcgtctagagcttgcacccagagatgttgtcgcaagaagcattatcaaggaggccgaggtaccgctcaggggcgtatttttggatatcagccatcaatcagatgaatttatcagtcagcattttccaaaaatttatcaatctagcttagcctaaggcgtggatataacgaagcatccaattcgtgtatcgccagttcagcattatttttgtgggggtgttttgacagatgtcaagaggcgaagtgatgtggtgggtttgtattgtttgggtgagatggcatatacagggctgcatggtgctaatcggttggcgagtaattcattgctggagtgtttggtgatgggtcaaaatgctgccaaatctttgcaagaacctttggcgaaatggtcaaatcgtgaagtactgcctaattggtcggttcaaacgcatcaaaaggatattaatctggcatcaagtataccattggatgtcgctcagattaagcagctaatgcagcaacatcttggggtaatacgcaggcaagaggatgtggcaaaaactgtcgagcttttggcgggagctttggctgatctatccacccaaaatctcactacccaaagccaaattcaaaagcttaatctcaccatgtgcgcttatttggtcgcaaaagcaagcttagatcgcccgcatagcattggctgtcattattgggtagaaaatgagccaaatctgatagcaccaaatcgactgccaaaagttgtatgagttcttttggtatttgatgataacaacccaacaaataggttttcaactctagcaatctagcaaagtgattaaaattgctaagataaaatagcgtaccataaaattgcataaacttgtttgacaagggttggcggatagattattaatgttataatataactttttgtatcatcagatggtcgccgattttggtgaaataaattttactaaaagattgcaatttataactaaatcgttcataatatgacaactgataatcgttatcgttactatttttatttttaatttttgtcaatagatataccatatttggttgtttatgggtgttttaagtggataattccaaaaaaatcaaagtgttggctatctctatcgcagctgtcttgcatggattggtaggttttggattggcgaatatgactataaaaccaatcacaccgccacctgttacaccgcctttagagattgaatttatcaaagaaccagtgcctgaacccatcgcacttaatgaccttgaatcgcctgaaccaccaggcgaacctgttgttacaccagagcctgttgtagagccagaggtcgctacgcctgaggttattgagccgcccgaacccattcctgaacctgagccattacctgaaccaattcctgagcctgagcctgagcccgagattgatgtagaagccatcttagaacaacaaagacttcaagaggcttgggttgctcagcaacaacaattggccaaaattcaagaacaagagcgacttgaacaagaacgccttgaaaatgaacgcagggaacaagaacgacttgaacaagaacgcttagaaaacgcaaggcgtgagcaggagcgacttgacaacgaacgcagagccagagaacaagcacagaaagaagcccaagtggctgctgcaaggcgagcagctgcccaagcggcggctaatgctgccaaaaaagcaggcaatcatgggggcggtcagcctggccagaatcagaccgtggaaggtggtattaatatcagtaatgccagctggaaaaccaagcccagagtgaataatttttgttcagcaagaagtgatattgacaccacgcttcaagtgagtttccgtgttgatgctgagggtaaaatctccaatgtcaatttaaatggctcaacaggcgatgccaaattagaccgacagattatccgtcaaataggtcgtggtcgcctgcatccatttagagaaggtaacatcacgcgtgttggcactgcaatttatccgattacgctaaaattacaaaaagatgagtcttgtaccaactgattttgtggttttaactgatttttagcaataattcttatgataacttagttgagttgcccaaatatttggccatctgattaagttttgaaaatttgaggtgaatttatggattttggattttattggtcgcatactgatgcggtgagtaagacactgttttttgtcttgttggctttatcaatgatatcttgggttgtgggcatcatgcgtgtgattaactctcggcgtcgcacagcaaatattgttgatgagctaactgcccaaattaatatccaaaacttgggtgatttgccatttgaccaacgcaagatggcaacagagcaaaaactgctccaacaaatcgctcgtcatcgttatgaacttgaaaaaggtctgcccgttcttggcacaacagcttccatcgcaccttttattgggttgtttggtacggtttgggggatttttcatgcccttcacagcatcggtgcaacaggtcaagcgggcttggcacaagtggcagggcctgtgggtgaggcattgattatgacaggtttgggtctagcagttgcaatacctgcggttattttttataacattgccacacgcatcaacaagcaagcgattcatctggcaactgatacagcccatcaaattctgtctaagattgtacgataaaggagggtctgatggcttttgagttaggtgatcatgacaataacggcatgaatgagatgaaccttattccgctgattgacatcatgttggttttgatgattatttttttggtaacagcgaccgtgctaaacccaagtgtgccgcttgatttaccaaaaacttcggcatcggtgaatgatgcaccgcctgaggtcttacaaattagcattgatgaggcagggggcatttattgggaccgtgaagcactgaccttagatgagctgagccaacgcttcaccgagcaggttaatgcaggcaaaaacccccaaattaatttgcgtgctgataaagagggtaaatacgataccgtcgcacaggttttggctgaggcatcaaaagcaggattgggcaaaatcgcttttgtcagcgaatagatggtttaatcaaatcaaagataaataaaaagcactgttttaacagtgctttttattagcttattatttattaagtgagcttattaagtgattatttattaagtaactatttattaagtgattttttagaattctcagtaatgtcctttctgatattttttcttaggcaaaaaaacatcacacccaaaaatataaacatgacaatcatatcaccaaaagcggtaaattcgccccagtatttcccctctgcaaaaatgaatgcaaaaaatgtatgtaaacctgccatcacagtaaacatactcacccaagccaaattaagatactgccaaccttgatgcgttaggtgaaatacaggttcaaacaagcgtttgatgatggggcttttatctttgctaaataatggggagatgagtagccccagtgcaaatgcaccattaattaacactgcttttagcatgatataaaatgcgtcgctaagtgctaaggtgattccaccaaaaaccaccgtcatcagtaacacaaaccactgctgcttttctaggtgaaatctttggctgatgaataaatacccatatataattacagttgcggcaatcagcccaaatgttgccactaaaatgtggttattatccgtacctgccgacccaatgagttgtaaaatcggatgcgtgctgtctgttggttcggtcgttttataaagaacaaaaaatataatgagtggaatatagtcaaataaggctttcatgatgcatatcttttaattaaaaaaagcacacctgacactatctgccaaggtgtgctgttgtttagctgcgtacagtatcgctactggtcttgtgagtgaccgcttgtggaggaagtgggcgaattggctcaaccaaagctaccgccagcacctcatcaatggtttcaacagattgaatgacaagaccttctttgacattgtcaggaatctcgatcaaatcacgctcattggatttgggtatcaagacatgcttgatgccgccacgatgtgccgccaagagcttttcttttaatccaccgatgcgtaatactttaccacgcaaagtaacctcacctgtcatggcaatatcagcacgaatggcgatgcctgtcatggcagagacgatggcagtagttagggcaatacctgctgatgggccatcttttggggttgcaccttcaggcatatggatatgcaaatcggtatttttaaatttttcataagtaatcccaaatcgctcaccattggcacgcacaacactcatggcagcacgaatggactctttcatgacatcaccgagcgaccctgtaaagacaagctcgcctttgccctgcatggttgcagattcgatggtcaaaagctcaccaccaaccgaagtccacgccaaacctgtaatgcgtccaatctcagggtctttttcagccaaaccataatcatgtggcttgacgcccaaataatctgaaatattatcatcggtgatggttaagctatcgatattaacaccttttttgggtttgacgccatatttttcgatttgggagcgtaccgcttttcggctaatcttattaatctcacgctcaagattacgaacgcctgcttctttggtataatggcggataatactggttaatgcatcatcagtaatatcaagctcattgggttttaggccgttttgttctaaagcttttggggttagataattattggcaatggccattttttcatcttcagtgtagccaggtaagcgaatgacctccatacggtcaagcaatgcaggcggaatgttcatgctgttggcagtacaaataaacatcacttgcgataagtccaaatctaaatccaaataatgatcattaaaggatttattttgggaaggatctaagacctcaagtaaggcagaagcagggtctcctcgaaaatcttgtgccatcttatcaatttcatcgagtaaaaatagcggatttttaacctcaactttggcaagtgattgtacaattttgccgggcatcgcaccgatataagtacggcgatgcccacgaatttcagcttcatcacgcacgccgcctaatgccatacgcacaaacttacgacctgtggcacgagcaatgctctcgcccaaggaagttttacctaccccaggagggccaactaaacataaaataggccctttaagctgcttcactcgagattgtactgccaaatattccaaaatgcggtctttgacatcatctagcccataatgatctttatccagtgtttgtttggctttatcaagattaatgctaactttactggctttgttccatggcgtgtctaaaatccactcaacataacctcgtaccaccgatgcctctgatgatgatgctggcatttgtttgagctttttaaattcactttcggccttttttcggacatcatcgggcaaatcagcttcttttaagcgattttcaagctcaacatcgtcatcatcggcaccatcatttaaatcggatagttctgatttgatggctttcattttttcatttaagaaatactcgcgttggttgttttccatttgctttcgaacagtgtcttgtagctgactttcgatgctatgctcggttttagtgttagtgaaatattcgcttagcaccttaaagtattcagcagcatcacccgattcaagcaacgcttgctttttatcaagaggtagctgtgtgcgtgtcacgacaaagtaaattagctcaagcaaattatcaaaaccgctggcaacacggatcagctcacgcgaatttctcagcgtactttcagcatagtcactaaatagctcaagtagcaccgacttttgagcatcagcttcttcttggctaagattgaggtcaacattggcagccgtgaactcagcgataaagctatcatcagtatcatcattggcattttggatgcgaccgatttcaacacgctcaagaccctcaatcaacacctttaagcatttatcatcggagtcatgtggcatggtactgacaattcggcaaagtgttccgtagcgatgtaaatcttcaatatcaatctgttcagacagtgaatctttttgggcaaccgcaatcagtttaccctcatgtgatttttgggcaagttcaatggctttgatggactgctcacgaccgataaataaggcgacttgtgtctgtggaaaaatgatgacatcacgaacagcaattaagggcagttgttgtaaattatgatgattattggcattgtcataagttgtatttggggttgtcattttagtattccttatatttttaaaatgatgctggatttatggtggcttgtagcgtaaattgcaagacctgacattaaaaacttggcaaatcattcgcttttttaatcatcatgaccaaatgattggctttgtaaaaattgtctatcacaattaaatgtataacttattgatttatcataatatttttaaaaaattttatgaatttttttgggtataatacagaatttaattttgataggtatgatttgggggtgatgatgaatgctgttttgcttgccgtcattgtgatggttggcttatcgcttgtacgggtacatgtggtactaagcttggtggttggggcacttgttggcggtttgatggcgggtatgtcggtcgctgatacgctgacttcttttcaagatggtattaaaaatggtgcacaaattgctttatcttatgccatgcttggtgcttttgcgatggcaattgcccattcaggattgccacagatattggcagataagctgattgctcggttgcagtacgctgatggcacaggtgggcttaagtttttgttattttttatcttaattattatggcaatcatgtctcaaaacattgtgccgattcatattgcctttattcccctaatcgtgccgccactgttatcggtgatgaatcgcttgcatctggatcgccgtgcgattacatgtattttaacttttggtttggtcaatacatacatgtttattccttatggatttggcgatatttttttgaatcaaattatccttaaaaatatcaatgaagcaggcatgataaccaacaacatctcaatgatgcaaactatgatgatccctgctttgggtatgctgattggacttttgattgccatttttgtcacgtatcgtaaaccgcgtcattatcaagaaaaagtcgtggcggtcggtcaggcgtctattcaagtcggtacgcttaatatcgtcgtggcaatggcggcaattgttgcggcatttgtcgcacagctaatgacagattctttattgattggctcactcgtgggttttgcgatatttatggcaacaggtattgttaaatggcgtgatgccaatgaggtttttaatgatggcattaaaatgatggcgatgattggctttatcatgatttgtgctcaaggttttgcagaggtgatgaaagccacagggcagattaatgcgttggttaatggggcggtgggtctttttggtgataacaaaatgcttgcggcagtatcgatgcttttggttggtttggtggtgacacttggcattggttcatcattttcgactgtccctattattgcgaccatttatgtaccattgtgtatggcgatgggctttagtgtacctgcgacagtggctttgattgcaacagcaggcgtactgggtgatgctggctcacctgcatcagattctacattaggtcccaccatggggctgaatgcagacggccagcatgaccatattcatgattctgtgattccaacttttatccactataatattcctttgattgtttttggttggattgccgcgatggtgctttagtctttttgagtacttgatatttaatgccttgaaatcgcttcaaggcatttttttggctaatgattttcttggcctaaataagtaccacgctttggttgccatttgacttcttcgccacgcaagattttttcaatcatcatcttggtatgtgcacgatgatgattgagcatgctaatcatatgcgtatttttatagcggctgatgtttgggtcgtatgtttcggcagcagctgccacaccatctcgatctcggtgatgatacagatgtgcgatgcgttcagcaatctcgctatccatccccaaaagctcaagccctgtacgggcactgcgtaccgctgaatcaaaagtctcacgaattaccgcactggcacctgctttgtgcaattggtaggcatgaatgcgatcataagcacgagccacgattggcaaatcgttgtaggtgtggcgtagatggcgtacgatggacagtgcctctttgggatgatcgatagcgattaaaaccagtttggctttggcgatgcctgccatatcaagcaaatcaaatcgtgtggcattgccataataagtctgaatccccaagtttgacaaaccatctacatggtcagcatcactatcaatcaatgtggtctgataaccacatgcggtcatcatgccattgacaacttgcccgtatctgccatgtcctaagataatgataggattttcttcatcaatggcatcactgtctcttacagacgctggcgatgtgtttttggcggtgtatttttgatgaatcactaaaaatagcggcgtaagtaccatggacatcacaacgattgctgttaaattagcatgcgtatcggcggatatgaccgaatgcgtcgccgctgctgaaaatagcacaaaggcaaactcaccaccttgtgccatcatgactgcacgctcaatagcgatggcatgcccagctttggtcatacgggccacaaaataaatccaaagacctttggtgagcatgagtgcgatgacgccaagactgataagttgccagtttttggtcacgatggataaatcaagtgccataccgacgcctaagaagaacaagcccagtaaaagaccacgaaaaggctcaatatctgcttcaagttgatgtcgaaagctggattcagataacagcacacctgcaacgaatgcacccatcgccatcgacagaccgccaagctccatcagtagtgccgatcctagcacgaccaataacgctgcagctgtcataatctctcgtacaccagttttggcaagtatcgtaaataatggattaatcagtacacgcccaacgatcaacaatgccagtaatgaacctaatgccacagcaatcgcttgccaagctggtgtttcactggtatgcaccacaggcgataaaaaagccacaatggctaacagcggaacaatcagcaagtcttcaaataataagatggataccatgctttgacctttggcggtagacaatccattattttcgcccaaagtttgcatgacaattgccgttgaggttagcacaaaccctgatgcccccacaaatgccacttgccatgataccccaaatatcttgagtaccaacatcattaaggcggttgcacctaatacctgcaaagacccaagcccaaagatttgtcgtctaagactccacaaatgcgatgggtgcatttcaagaccgataatgaataaaaacatcaccacaccaagttcagcggtgtggatgatggtctgtgggtcggtaaatatccctaagccaaacggcccaattatcagaccaccagccaaataaccaaggacagaccctaacccaattttacgaaaaaggggtactgcgattacggcagctccaagtagtgttacaacttgaatcagctcgcttgccataccagcttcagccatcgttattccttattttagtgatgaataaaaaagcacaaatcattaagccaccattttaatgtaagttaatgcaagcttaagtattgtgctaatcaaatcaaaaatgataaacttatatgacaaaatcagataataaaattatcgccgtgtgatgagcaatcggttgaattgatcaattataaccaacctgcttttctaaatttggtatataaaaacaaacaaaccagcatgaccgcaccaacaacaacaaaataagcataccgaatatgcagctcaggcatataatcaaagttcatgccataaataccagcaaccgccgttggtacagcagcgataccagcccaagccgccaattttcggacaacatcattttgccccattgtcaccatcgccatataggtatccattgccacagagagcatttcatttaggccattgacggcatcaattgagcgtaaaagatggtcattgacatcacgaaaataaggtttggcggcaacaggaaaagcagagaccaattcattttttttatgattaataaaaaagttacacacatcttgaacaggcaaaatcaccgctcgcatatgcaccagttgagattttagttcatataaactttttagggtggatttgctaaactcatgtgaaaagatattgcgttcttgctcacgcaaataattgcccaatcggtcagtgattggtaaatagttatcaacaataaagtctaaaattgcatgtagtacaaaaattggacccaaacgcaatttttcaggtcggcggtggcaatgttcacgaacaggggtgtaggaattggatgcaccacggcggacgctgatgatgaaatttttacccataaaaatggcggttgtaccatagcgaatttggttatcctcaagcttagcagtacgcacaaccacaaagatggtatcattaccgtagctttcaacctttgggcgttggtgatcagcaaaggcatcttctaaggcaagctcatgtaagtcaaatgcatcttgaacctcttgaacggtttcaagactgggatcgtatagtccaagccagataaattgattattattagtaagcgtacgactgacatcctcgattgctaaaggctcaatgggtgcgcctgttttacgagagtaagcataacagatgacagtttcattatccccagattgctcaatatcttctaagcggtcggcatcaggatcgtagactgtcattgtctcaatggtatcttcgtctgtggcatcggcatcgccatagatatagctgtcttgagtgtcgtggaaagtttcagcactttcaggggtatgctcagggtcgttggtgactttgatcatgtctgactcatcaaacagctcatcttgatgaatgataggattaagatcagatatggtggcggatttggtagggtgggtcaggtcgtttggatttggggtgtgatcggtttgtgtattatgctgtgtcataaaatccccaaaaaatcgcaaattttgtgatgatcagtgtattaaaaccctaaactatttagcaaatttatattcagtagattattatagcaatactgtcgcaatttttcatcagttaaatgatgacttcattgacaattgagcgattgataaaatttttttcaaattaaccttgcaagcctgctaaggtatggtacactagtcaagaaaaaatgctaaatgcttactgtgatcacaaatgagtcaatataactcatttgtaattatgatgcttattttataagcttgttataagcccaagttattttttcatgacaccgtatttcatgacaccgtattttggtcaaacgcttgtttgactgtttttatttgctgacaggggttttttgtgccaaagcatagcaccaccaattttaacaccgaacaccaaatggatacaaaacacattcagcaaaattggcttctacctgatggtgtggctgatgtactatttaccgatgctcaaaaacaagaaagcctgcgtgatgccttgctatttgtgctaaccgcacacggttatcgcttggtgtcaccaccattaatagagtataccgaaagtctgctaaataatgctgacgaagatctaaaacgccaaactttcaaatttatagatcaactcaatggtcgtttgatgggtttgcgtgccgatattacgccacaaattctacgcattgatagcaaatatggtcaaggcatcagccgttactgttatgttggacaagttgtcaaaaccctaccgaatggtctgtatgggctgcgtacaccgcttcaattaggtgctgagatttttgggatagatgatatctgtgccgagcttgagctgattgatctgctggtcgcattggcagatgagatcggactagaccgacagatgctacatgtggatattgggcatgtcgctatttttgatcgcttgtgtcagttgcatggcgtttcaaacaaagatgctgatgagctgattggcatttaccataaaaaagccatgccagaacttaccaaatggtgccacaatatgggcaacagcttacctagcccaagcgatgcaaccgattttttggtattggctaagcatacattaagcagtgatcggacgccaaatgccgaggctttattgaataagctgtccgataaagctggcctagatattcgaatcatccaagcggcaaatgagcttgctgctttgtcggcgcatatctgagctgtgggtctaagcaaacgtntttttgt

SEQ ID NO: 20 - DNA, 31063 bp, Moraxella catarrhalis
acgctttgctatccgtgaagacggtcgtaccgtaggtgctggtgttgttgctaatgttaaagactgatatttttagtatttaacttaagcagttaccgcaaaaaccaaacctgaaagggtttggttttttgttggatattgcttgaattttttagataaaatacttgcaaaaaatataaagtttgctataatagcaattcttaataccctaggcgattggctcaattggtagagcatcggactccaaatccgagggttgggggttcgagtccctcatcgcctgccatcttattattcataccattcttttaacttcataaaaattggtcattccaaggcaagtccctgcatgagcgataataaagacaatttggatatccaatctggaacttcagcatctggctcacaacatacaaaagaccctatcacggttgcaaaagagagtgtggtagaggttgctaaaaaacattcagcaaaagattttttgttgtggttaattgccatcattgctatgatctcagcaactttggtatcccaatatttgccaaggtattgggcacctgccaataatgtttggacacagattgctattacggtaagcttggttgtatttggttttatatgtttggcgtttaccaatcaaggatcagctttcaaaacattgttaaaagatgcaggtattgagctgcgtcgtgtgacatggccaaccaaagatgagactgctcgttatacttggcaagtaattttgataatgattatttttggaattatcatttggttgctagatatgttttttagctacattgttggcttgattatttaaataactaaaaagggttgataaatgcgttggtatatcattcaagcgttctctggttacgaaaatcaagtacagcgttctttggttgaacgcattaaacgtagtgaatttgctgataaatttggtgaagtgcttgtaccgactgaagaagttgttgaaatgcgtgaaggtaaaaaatgcaccatgcagcaaaaacttttcccaggctatgtcctgattaatatggaaatgaatgaagatacttggcatattgtcagatcttgcccaaatatcacaggatttatcggtggcacgccagagagtcctgcaccaattactcagattgaagcagatcgtatcctaaatcgtattaataaaactggtgatgcaccgcgtccaaaaaccatgttcgagcctggtgaagaagtgttggttattgatggtccgtttacggactttaaaggccttgtcaaaaaagtggattatgataagtcaaaattacatttgactgttagcgtatttaatcgcccaactgaagttgagcttgaatttaataaagttgaaaagattaattaattgccgtataatatacggttttggctctggtcaatagctagagtttgttattaacttggggagctgtttagcgttattacccattattggagagattctcatggcaaagaagattgatggctacatcaagctacaagtgcctgccggaaaggcaaatccatcgccaccaattggtccagcgttgggtcaaaaaggcgtgaacatcatggcattttgtaaagagttcaatgctgcttctgcaaatattgagccaggcttgcctattcctgttgtaattaccgtttttaatgacaagtcattcacttttgtgatgaaatcacctcctgcagcagttttattgcgtaaagcagcaggtatttcaaaaggttcaagtacgcctaacacttcaaaagttggtactgtaaaccgtgatcagcttgaagaaatcgtaaaaaccaagcaagcggatttaaccgctgctgaacttgaagcggcaattcgtaccattgcaggtactgctcgttcaatgggtatcactgtggagggtgtgtaatggctaagctaactaagcgtcaacaattaatcaaagatcgtgtcgatagcaacaagctatacacgatcgaagaagccgttgcaattttgaatgatttgccagcagtaaaattcaaagagtcaattgatattgcgattaatttgggtgtagatccacgcaaatctgatcaagttgttcgtggtgcaaccaatctacctgcaggtactggtaaaactaagcgtgttgcagtatttgcacaaggtgctgttgctgatgctgccaaagaagcgggtgcagatgtcgttggttttgaagacttagcagaaagcatcaaagctggtaatatggattttgatgttgttatcgcatcacctgatgctatgcgtgttgtcggtcagcttggtaccattcttggtccacgcggcttgatgccaaacccaaaagttggcacagtaactgctgatgtcgctactgccgtaaaaaatactaaagcaggtcaggcacagtatcgtgttgataaagcaggtattatccatgcttctatcggtcaagtgggcttcactgctgatcaaattgagcaaaatgcaacagctttattaaatgatcttaaacgtgctaaaccagcaacttctaaaggtatttatattaagaagattacattatctagtactatgggtcctggcatcacaattgatccagtgccacaccgtgttaataagtaatcaatacattgagttaaattcttataatttaacttgatttaaaaattttattgattataataatacaattttgatggctaaagtttactttggtcatcaacagaattttgacaaattaatatttattagttcagcacaacgggttgtgctgtctaagaccgtaggtattgctaagcaatctaataggagaaacctgcctacgcagacggtgagactatattgtcgccgtaatggtgcaaacatcctttggtgtttgtgaatttgacttattgcttttgtggtattttaagcaataattttggagacaacccatggcactaaatcttcaagacaaacaagcaattgttgctgaagtaaatgaaactgccaaaggtgcgctctctgctgtagttgccgactcgcgcggagttacagtagcaaagatgaccgaacttcgtaaagctgctcgtgaggcaggtgttgatatgcgcattgtacgtaacactttgttgcgtcgtgccttagctgatacctcttttgagtgcatgaacgatgtattcgttggtcctacattaatcgcattttcaaatgagcatcctggtgcagcagcccgtttgttcaaagaatttgcaaaggccaacgataagttcgaaatcaaaggcgcagcttttgaaggtgaatttattgacgcaaaatctatcgatcgcctagctaccctaccaacttacgacgaagctattgcgcgtctaatgggtacgatgaaagaagcagcagcaggcaaacttgcacgcactttggctgcacttcgtgataagatggaatcagaagcggcttaatttactgtcatattttaaatttatttactctcatacctttatttaggaataattgctatgtcactaactaatgaacaaatcttagacgcaatcgcagaaaaatcagttatggaaatcgttgaacttatctctgcgatggaagaaaaattcggtgtatctgcagcagctctagcagcagcaccagcagctggcggtgatgctggcggtgcagctgaagaaaaagatgagtttgatgttgttctaaccagcgcaggcgataaaaaagttgctgtaattaaagttgtgcgtgaagttaccggtctaggtctaaaagaagctaaagacctagttgaaggtgcgccacaaactgttaaagaagctgcatctaaagctgaagctgaagagcttaagaagaagcttgaagaagctggcgcaagcgttgaacttaaataatttttctaaattgctgttcattaatcaaccagcaatttaaaaattattttttaaaaagccaataatatattgcattattggcttttttttattataattaagtatttgaccttttgtgtatctatttttatggtgggatagaaacacatcccaaaaggacaaacgcacccatgcaagctgaacgacttacctattattaacagtgatttgctagatactggatggtatttggtgattttttgtgtctatctgtctttatttcgtgtaattttcctttgtcgagttcaaaaaatgggtgcttattctcaagaatcgcaatgattctttcatattttgattttagctattaaaatagacaaaatctttggcagtgtttgcctctttggcaacatatttttaagttaatctaaggaatcttaatggcatattcttataccgaaaagaaacgtattcgcaaaagtttttcaaagcttccagatgtcatggatgtgccttatctgcttgccatccaagtggattcttatgagcaattcttacaagagcataaaaaaccaaaagctcgtgccaacattggtttacaagcggctttttcatcaatttttccgatcgaaagccactctggtaatgctcaattgcaattcgttgagtattacttgggcgagcctgaatttgatgagcgtgaatgtattatgcgcggttcaacttttgcggcacctttgcgtgtaaaaattcgccttattattaaggataaagaaaataaaactgccattaaagatgttcgtgaacaaagcgtttatatgggcgaaattccattgatgacagataatggtacttttattattaatggtactgagcgcgtcatcgtttctcaattgcatcgctcacctggtgttttctttgaccatgataaaggtaagtcgcattcaagcggtaaagtgctttataacgcacgcattatcccttaccgtggttcttggcttgattttgaatttgatgctaaagatttggtgtacgcgcgtattgaccgccgtcgtaagttgttggcaacgattattttgcgtgccattggtatggataccgctcaaattttagatcaattttttgaaaaagttgaagtatttaaaggtgatgaatcctttgaaattgaactggttgctgatcgtttaaaaggtgagatggctcagtttgatattgtcggtcctgatggtaatgtgattgttgaacaaggtcaacgcattaacgcacttcgtgtaaaacgaattttaaactcaggtatgaccaagcttgcggtacctgatgaatatttgtatgagcgtatcattggcgaagatattgtggttggggatgaggttttggttcgtgccaataccttgatcgaccatgagattctggtaaaacttgctgaaaaaaatgttcaatcatttaagattttattcacgaatgatatcgatcatggtgcatatatcgctgacacgctacgcgccgatacaattgtgactcgtgaagaggcattgattgagatttataaagtgatgcgtccaggtgaaccaccaacacttgatactgctgaaaaactttttgaatcaatgttctttagccaagagcgttacgacttgtctaatgtgggtcgtatgaagtttaaccgtcgattgggtcgtgagttcattgataccgatgatatggatgtgcaacgcgaacaaggtgttttatccaatcaagatatcgttgatgtcttaaaagagttgatcgagatccgtaatggtcgtggcgaggtggatgatattgaccacttgggtaatcgccgtattcgctctgtgggtgaaatgactgaaaaccagttccgtatcggtttggcacgcgttgagcgtgctgttaaagaacgcttaaccacagctgattctgataatttgtctcctcaggacttgattaactcaaaacctgtggcagcatctattaaagaattttttggctcaagtcagctatcgcagtttatggatcaaaataacccattatctgagattacccataaacgccgtgtatcagcattgggtccaggtggtttgacgcgtgagcgtgcaggctttgaggttcgtgatgtccatacgacccactatggccgtgtgtgtccaattgaaacccctgaaggtccaaacattggtttgattaactctttagcgacttttgccaaaacaaataattttggcttcttggagacaccgtacagacgcgtcgttgatgggcgtgtgactgacgaaattgaatatgtttctgccatcgaagaagtaggcatggtaatcgcacaagccgactcaccaatgaatgacaagggtgagctgaccgaagagatggttagtgttcgtcacgatggtgaatttgtgcgtatgagcgccgataaagttactcatatggatgtttcaccgcgtcaggtggtatcggtagcagcaggtctaattccattcttggagcatgatgatgcaaaccgtgccttgatgggttcaaacatgcagcgtcaggcagttccaacactgcgtagtgataagccacttgtaggtacgggtatggaacgccatgtggcgcgtgactcgggcgtgtgtgtggtcgctaagcgtggtggtgtgattgaagaggttgatgccagtcgtatcattgtgcgtgtcaatgaggatgaaatgactgcaggtgaagcgggtattgatatttataatttgattaaatacacccgttccaaccagaatacctgtattaaccagcgtgttatcgtcaatgaaggcgatgaaattgaacgtggcgatatcttggcagatggcccatcgactgatcttggcgagcttgcacttggtcaaaatatgcgcgtggcattcatgccttggaatggctataactttgaagactcaattttactttctgagcgagtggttcaagaagaccgtttcaccacgattcacattcaagagttaacttgtgtggctcgtgataccaagcttggaccagaagaaattacaggcgatattccaaatgtcggtgaggctgcattggcaaatcttgatgaagcgggtattgtgtatatcggtgctgaggtcgatgctggtgatattttggttggtaaagtaacaccaaaaggtgaaagtcagctgaccccagaagaaaaactacttcgtgcgatttttggcgaaaaagcggcggatgttaaagatacctctttgcgtgtaccatcatcaaccaaaggcacggtcattgatgtgcaagtctttacccgtgatggtcttgaaaaagacagccgtgccaaatctattgaaaaagccatgcttgatgattaccgtaaagatttaaaagaagaactggtgatttttgaagcagctgcaaaaggtcgtattttaagcttacttgatggtaaaaaagtcagcggtggtgcaggctttaaagcaggtacgattctaagcactaaagacatcgaaaatttgccactagaaagcttgctagatatccagcctgctgaagaggaagtttcagagcgtttgggtcagattgctgaattcttaagtgataagcaaaaagatatcgataataaatttaccgagaaaaaacgcaaattaactcaaggtgatgacttagcacatggcgttcagaagattgttaaggtgtatttggcggttaagcgtcgtatccagccaggtgacaagatggcaggtcgtcatggtaacaaaggggttgtatcacgcatcatgccagttgaggatatgccatatgatgaaaatggtaatcctgtagatatcgtactaaacccattgggcgtaccatctcgtatgaatatcggtcaggtgctagagacccatttgggtatggcagccaaaggtttgggtgataagattaatgccatgttgcgttcgcaagttgctgtgagtgagcttcgtgaattcttagataagatttataaccaagtcggtggtgagcaagtagatttagacagcttgtctaatgaagatttattggcactgtgtcagaacctaaaagatggtgtcccaatgggtacggccgtttttgatggtgccaaagaaactcaaatcaaagagctgttaagtttggccgacctatcaaccacaggtcagcaaacactttatgatggcagaacaggtaagaaatttgatcgtcctgttacggttggctacatgtatatgcttaagctaaaccacttagtcgatgataaaatgcacgcccgttcaactggctcttattcactggtaacacagcaacctcttggcggtaaagcacaatttggtggtcagcgttttggtgagatggaggtttgggcgctagaagcttatggtgcaacttacactctacaagagatgctgacggtgaagtcggacgatgttgagggtcgtacacgcatgtataagaatattgtcgatggcgagcagtatatgaatcctggcatgccagagtcgttcaatgtcttaaccaaagagattcgctcgctgggtattaatattgacttaaaagaaaagaagtaacttagcctaagaccaacatacccagtgatgaaatcgtcgctgggcgtaaagattacgacgaatacaacggagaaaccttttgaaagatttattagatatcatgaaaggccctgctgacaatggcgtcaaagaatttgatagcattcaaatttctttagcgtcacctgaggcaatcaaatcttggtcgcatggtgaggtcaaaaagccagaaaccattaactaccgcacctttaaacctgagcgtgatggtctattctgtgccaaaatttttggtcctgtcaaagactttgagtgtttgtgcggcaaatataaacgccgtaaatttcaaggcatcatttgtgagcgttgtggtgttgaagtgactgcggctaaggttcgccgtgagcgtatgggtcatattgagcttgcctctccagttgcgcatatttggtttttaaaatcgctacctagccgtatcggtcttcttttggatatcactttgcgtgatattgagcgtgtgctttattttgaaagttatatcgtgaccgatcctggtatgaccagtcttgaaaaatatcagctgttggatgatgaagagtattttaatgcacttgaacaatatggcgatgagttcattgccaagatgggtgctgaagctgttcaagatttactgcgtgatattgatgtggatggcgaaattgatgagcttcgtactgcaattccacaaactggctctgaaaccaaactgaaaaaaatgtccaagcgcttgcagttacttgagtctttccgtgactcaaataacaagcctgagtggatggtgatgactgtgttgcctgtgttgccaccagatttacgccctttggtaccgcttgaaggtggtcgttttgccacatcagacctgaacgatttgtatcgccgtgtgattaaccgtaataatcgtttaaaacgcctgcttgagctgaatgcacctgatatcattgtgcgtaacgaaaagcgtatgctacaagaagcagttgatgcactactggataatggtcgccgtggccgtgctattacagggtctaacaagcgtccattaaaatcgcttgctgatatgattaaaggcaagcaaggtcgtttccgtcaaaacctacttggtaagcgtgtggactattctggacgctcggtgattgtggttggtcctactttgcgtctgcatcagtgtggtttaccaaagaaaatggcacttgagctgttcaagccgtttacctatgccaaattgctgcaaaatggcattgcaagtaccattaaagccgccaaaaaaatggttgagcgtgaagagccagccgtttgggatatgcttgcgatggtcattcgtgaacatcctgtcctactaaaccgtgcaccaacacttcaccgcttgggtctgcaagcatttgagcctgtgttaattgagggtaaagcaattcagttgcacccactggtgtgtgctgcgtttaacgccgactttgacggtgaccaaatggcagttcatgtaccgctgactttagaagctcagcttgaggctcgtgctttgatgatgtcaaccaacaacatcttgtcgcctgcaaatggtgagccgatcatcgtgccttctcaagatgttgtgcttggtttgtattatattagccgtggcggtgtgaatgccaaaggcgaaggcatggtatttagtacggtgaatgaagctctaagggcaattggttcagatgatttatctgtgaatgccaagattaaagttcgtgtcgctgagacaattttggatgaaaaaacaggtgaaaaaatcagtcataccagtatccaagataccgtagctggtcgtttgctaatttggaatatcatgccagaaggcatggcgtttagtgagtgtaacacggagatgaccaagaaaaatatctctaagctgttaaactcatgctatcgtaagctgggtgttaaagaatcggtaatgtttgctgaccatctgatgtatttgggttttgcacaagcgactttatcgggcatttcgattggtatggaagatatggttattccaccaaccaaaaagcagatcgtggatacagctgatgctgaagtgcgagatattgaacaacaatttgagcaaggctttgtcactgcaggtgagcgttataacaaagttgttgatatttgggcgcgtacttcagataaaattgcaaatgcgatgatggataacttgtctaaagacgatgtgatcaacgcagacggtgagaccgaaacgcaaaagtcattcaactcaatttatatgatggccgactcaggtgctcgtggtagtgccacgcagattcgtcagcttgcaggtatgcgtggtctgatggctaagccagatggctcaattattgaaacaccaattaaagccaatttccgtgaaggcttaacggtacttcaatactttatctcaacgcacggtgcccgtaaaggcttggcagataccgccttaaaaacagcaaactcaggttatctaacacgccgtttggttgatgtcgcacaagacttggtcatcacccaagatgattgtggtacagatgcaggtcagcgaatgacacctgtgattgttggtggtgaaattgttgaacgcttgggtgatcgtgtgcttggtcgtgttgctgccaaagatgtcgtgaatgcagatggcgatgtggttgtaccatcgggtgctttgattgatgaaagattggttgaaaagttagatgccaatgcgattgatgaagtgtatgtacgctcagtcattacttgtgaagccacccaaggcgtctgtgctaagtgttatggtcgtgatttggctcgtggccatttggtcaatattggcgaatctgttggggtgatggcggcacagtcgattggtgagccaggtactcagctgaccatgcgtactttccatgtcggtggtgctgcttctgctgcttctgttgataacagtgtctcagttggtaatgcaggttcggttcgttttcacaatatgaaaactgttcagcatgccgatggtcatttggttgttgtctctcgttcggcagagattggcgtggctgatgatcaaggtcgtgagcgtgagcgttataaagtgccttatggctcaagcgtcttggtgcgtgatgcagatgctgttgaagcagggcaggtaatcgccaaatgggatccacatacccatccaattattacagaattctcaggtaccgcacgctttagtgacattaccgatggcatgacagcaacggttaaggtagatgagatgacgggggtgagatcatttgaaatcttgaccggcaaagaccgtccaagtattgctaaggatttgcgtcctgcgattattcttgataccgatgaaggtaaagaagtggtttatttcctaccgaacgaaaccatcattcgtgtatctgaaggcgagcatgtcacggcaggttcggtgcttggtcgtgtaccacaagcaacctcaggtactaaagatattaccggtggtctgccacgagttgccgacttgtttgaggcacgccgtccaaaagatcatgccattatggctgagatgagcggtgtggtcagttttggtaaagaaaccaaaggcaaaaaccgctttatcatcaccaatgaagatggtgatgtgcatgaagagctgattccgaaatggcgtcaaatcaatgtctttgaaggagagaccgttgagcgtggcgaggtggtttctgatggacctcaaaatccgcatgatattttacgcctaaaaggtgagaccgcattggcaaattatattgtcaatgaagtgcaagaagtttatcgcctacaaggggtaaaaatcaacgacaagcacattgaagtcatcgttcgtcagatgttgcgtaaagttgaggttgtcgatggtggtgattcaagctactttaaaggcgaccaagcagaatactcaaaaatccgtacgcttaatgctgaattgatcgctaataataagtttcctgttcaatacgagcgtcagcttttgggtattactaaagcaagtttggcaaccgaaagctttatttcagcagcgtccttccaagaaacgacccgtgtcttgaccgccgctgcagtgatgggtaaggtggatgatttgtctggcttgaaagaaaatgtggttgtgggtcgcttaattccagcaggtacgggtttggcatatcatcaatctcgccaaagaaaagctcaaaatgctggtaaccaaactgcccaagtggatgagttattatcagtcataacagctgaaccgcctacaacttcagaagataatttgagtattgaagacaactttgccaaagcattcgctgatgagctgggttctcaagagtaagtgtgtattttcaaaggctcgtttctaggaacgggcttttgtttttaggctaaaataagaggtctactccaaccaaagctctgattattattttaagtcatgacagtttaaaatttgcctgataagttacattcacacattcgtgaatatattgcaaatttacatcaataagtgtataactatagttttgattgtcacctaaaaggatattcttatgactttatcattaaataaagaaaaaatccgctttttgttgcttgagggtgttcatgaaaatgcactaaaagtactcaatgaagcaggctataccaatattgaatacatcagttcagcacttgatgaggctgagttgatagaaaaaattaaagatgcacattttattggcatccgctcacgcactcagctgacacgcaaggtgcttgaagccgccgaaaagctgatctgtatcggctgttattgtattggaaccaatcaagtggatttagatgcagcgcttgaattgggtgttcctgtttttaatgcaccttattcaaatacgcgttctgtggcagaacttgtacttgctgagacgattatgctcatgcgtggtattcctgaaaaaaatgcagtggttcatcgtggtggctggaataagtctgccaaagacagctatgaggtacgaggcaaaaccatgggcattgttggctatggctccatcggttcgcagttatctgtactggctgaaagtttgggcatgaaagtaatctatcatgatgcgatgaccaagcttcccttgggcaatgccacacaagtaggtagtttggaggaattgttgtcaaaagcggatgttgttaccttgcatgtacccgattcaagcagtacacgcaatatcatgactgccaaagcatttgaacagatgaaagatgggtcttttttcatcaacgcttctcgtggcagctgtgtggacattgatgcattggcggcagcacttgagagcaaaaaaattcttggtgcagcaattgatgtttttccaaaagagccaaaatcagcagatgaagagtttgaatcaccattgcgtgcctttgataatgtgattttgacaccacatgttggcggttcaacgcaagaagctcaagcgaatatcggcttggaagtggctgaaaaatttgtacgctattctgatcaaggcgatacaaccagtgctgtcaactttccaaatgtctctattccgtttactgatggcacgcatcgcttattgcacattcaccgcaatgtcccaggcgtattgtcacaaatcaatgcatcatttgccgatgcaggcatcaatattattgcacagtctttaatgactaagggcgatgttggttatttggttatggatgtggatgataatgattctgaccgagcattaaagcgtttgcgtgctgtaccagaaaccatccgagtcagagtattgttttaattgattttatcaaatccaatcatgatgataaaaccgcttttaatcaggcggtttttgtgattttatggtacaatagattaataataacataataattttgtgcaagtcgtacttgactgtttgactgtttgactgtttgactgtttgactgtttgactgtttgactgttggcacatgataaaaatgaggaaaacaatgaccaaacattatgactatcttgccattggtggcggttcaggtggtattgcatcgattaatcgtgctgcccaatatggcaaaaaatgtgccattattgaagccaatttgattggtggtacttgtgttaatgttggatgtgtacccaaaaaagtcatgtggtatgctgcccaaatcgccgatgccattcataaatatgcaccagactatggatttaaaggcaatattgatgagtttaattttggtcaattaattcaatcacgccaagcgtatattgagcgtattcaccgatcttatcgtatggtatttgaaagaaatggcgttgaattgattcaaggatttgcccgttttattgataaaaataccgttgaggtggcttatgatgatggcacaaccgagcaaatcagtgctgaccacatcgtcatcgcaacgggtggtcagacagtcagacctgatattatcggtcaggagttgggtattgactcagacggattttttgcactcgatgagatgccaaagcgtgtggctatcattggtgcaggttatgtcgcagttgaggtggcaggtgtcatgaacagtttgggtgctcaaacgcatctgatgattcgtggcaatcagccactgcgttcatttgatgatgatatcgttgaggtgttggttaatgtcatgcaaaatgatggcattcaaatacacacaggcgtcaatacacaacaaattatccaaaatgaggataaaacgctgacggttgaatttaatgatggacaaaacctcaccgttgactgtgtgatttgggcggtaggtcgcaagcctgcaacagatcagcttaatcttgatgtcgttggtattaaaaccaataccaaaggccaaatcatcactgataaatttcaaaataccaatattgaaggcatttatgctgttggggatatcgttgcaaatggtgttgagctgacgcctgtagcggtggcatcaggacgacgattatctgaaagactgtttaacaacaagccagacgagcatttggagttaaacttggtgccgacggtaattttcagccatccaccgattgggactgtgggcttaagtgaagcgtcagcaattgcacaatatggtgctgataatatcaaagtttatacctcgaactttacgccgatgtacagtgcggtaacatcacatcgtgagccatgtcgaatgaagcttgtctgcttaggagaggagcaaaaaatcattggactacacggtattggttttggcatggatgagatgattcaagggtttgtggttgcgatgaaaatgggtgcaactaagcaagattttgatgataccattgccattcatccaacggctgccgaagaatttgtcacgatgcgttaatcgtcaaaaatcatcaaatttattatcaaaaaacccatgagtatcactgatgggttttttgatggtaggtttgtgtgtgcgttaaacagttggtaaaaataaaatgattatttttgcataaaaattgaccaaattttttcttttggtttaatcgcagaaacttgtttgataaaaaacttgcaaacttgacttttttcaaaaaaatggataattgctcattttgtgtgacaaatacaaaagttcaacatacgctataaactgttgggtctttggctaaggtttcatgattttcttgaaaaaatgcggcttgtatacgatgtttagccgcctgccataaaggaaattgatgacaggttgcttctaggctaccttgccatgttggaatgttgcccgccatctttatcaagcgatgctggggcgtatctttcagctttttggcagtttcaatggcaagtaatgcattttgacgatgattgcaaaccagtgccatatcacagccagcttcaatggcagcaaccacacgcgcatctataccgcctacaatgtgtgccgcttgcatgcataaatcatctgaaaaaatcacgccatcaaatccaagctgattgcggacaatatcttgaatccagattttagaaaatcctgcaggtttgtcatcaacttggctaaaaaccacatgggcaggcatgagtgcatcaagtttatctaaagttttgataaaggtttgggtatcataatccattatctcatcaaatgagcgttcatcaatggcatcagcaatgtgcgagtcaggggcaatagagccatgacctgggaaatgcttgcctgtggttgccataccagcatttttcataccgtccatgaattgccttgataatgttatgatggcatctggatttgcatgaaaagcacgatcgccaatgacaaggcttttgccatcaatatcaagcactggtgcaaagctaaaatcaacaccgaccgccaaaacctcgcaggccatcagatagccacaatcataagctaaagataacgcatctttgggcgatttatcgtataattgacccagtttacccatggcaggcaacgatgaaaatccttctttaaagcgagcaacccttccgccttcttggtcaacaccgatcagtagttgggggttgatttggcgtattgaatcggtcagtgttcgcacttgagcgggtgatttgacattgcgtgcaaataaaataatgccaccgatttctggattggataataattcaatatcgctgccatctaatgattgacctgcaatatctgccatgataataccttttgccacaaaatcctccaacacattcaaataagaccaaacataatatttatgggcatattatgccatgaaaatcaaaataaaactttggtgaatgttgattttgtggttaaacaataaccttgtaacgattgcttaagacaggtgtacaaaaatacgcacttgggtaaaaaaaactttgtgatttttgtgctaagatagcgaatattttaagattttatttgctaactgttaggatacagacatgtcaaaacaacaatatcttttatcaggcgtggcaagtgccatggcttttgcattatttgcaagcagtgtggcatcatttgctcaagcatctgaccgcactgcatttatacaaaagccagagcaaagggtgaccgcacgacaagtggcgatattgcttgatcgagcacattataacgaccaaagacttgatgaaagcatgagccaagttattttgcagcaatattttgataagcttgaccctaaccgtacgctattgttacaatccgatgtggatgaatttattagcaaatatggtaaaacttatgcagcttatttaatacgtggtgatttgacgcctggtattgagatttttgagcgttttcgtacgcgttcttttgagtattttaaagctgccaaagcacacttagcaacagatattgatttatataccaataaaagcattatattagatcgtgaaaaagcaccacggtttcggagcaaaaaggagcaacttgagtattggaaaaaccaaacgacattgtcattaattaccattatgattaatcaagacagcgacaaagcaaaagatcaggtttatttacaaaatcctgagttggctcgaggtcaagatttggtcaaggctgaaagtcgcactcctaaagagattttattaaatcgtatcaaacgccaagaagaacagcttgaacgactgaaaaatgatgaggtgatggagtcgatacttgatgcggcagccatcgcatatgatccacacagtaattattacgctcccattcaagcacaggatatacaaatccaaaatagtctacagcttgagggcattggtgtttctattcgacccgatcgcaaaaatcctgattacacacgcattatcagtttggttgatggcggtcctgctgccaaatcaggtcagatattggcaaatgatttgattatcggtatagcccaatctgatggtgaaatggtggatacgataggctatagcaccagagaaattgttgctttaatccgtggtactcgtggtactgaggtaaccgtcaaggtcaagcagccaaatacaccagattcgcaggccagaacggttactttggtgcgtgatatcattcgacaagaagaatcaggcgtgcagtatcgagtgattgacatgccttatgatggtagtataaaaaaagttggtgtgattgagattccaagcttttatctgaattttaaagcacgccgtgagggtattgatgccagtcagtaccgcagtgtcagccatgatacccaaaaagctttacaagcgttaaccgaccaaggtatcgatggcttggtggttgatttgcgaaataatcccggtggttcacttgatgaagttgccaaaatgcttgccatgttcatcaaggaaggtcctttggtgcaaattcgtgataatcgtggtaatgtgcaagtttttgaagatacagacggtgggcatcaattctatgatggaaaattgtctgtactcattaatcttggttcggcatcggccagcgagatttttgcagccgccattcaagattatgggctaggtttggtggtaggtagcacaaccactggcaaaggcacggctcagactcagcgagatgatttggcattaggttcgatgactttgacgcagcgtaaattttatcgtgtgaatggtggcagtacccaaaccaaaggcgttgtaccagatgttgaattggtaaatatttatgaaggtatcgaatttggtgagcgtgaatataaaaatccattgccttgggataccattaactcaaccaattatcacgctgaaggtaaatattcgccaagcctgttaagctcactcaataagcaatccaaagcccgccaagcaagtgacccacagtttaggtatttatctgaactaaatgccattcgcacgcttgatgatgataaaaaaccgactgagattaatttacaaaaacgccgtgccagacttgatatgattgaaaaacgcaccttggctgctgaaaatgcacgcaggcaagccacaggcgaggcaccatttgtagattggtcaacttatcaagccaatttggaggcattggctgaagagcggagcgctatgaaagaaaatgagcgtccaaagttgcccgaaagcgaggtttatgtgtttgaggcagcacgcttgatgtttgatgctgagcgataatttgttggcataaatctgctaattgtgatgaattaagcaaaccaaattgagtaaaataaaacagtctgttgtcataacagactgtttatgttttaatcatctttgaggcaatgagctatggaataattatctacggcgaccacccacaaagccgatcacaaataagacaacagcgataattaagaaaatataagcaaactctttgcttaaccctgcaatattaccaaatcctaaaaagcttgcgataatggcgataattgcaaaaataattgcccagcgaaacataggattctcctgataatgactggcatgtgtccaataaatttgtattaaccagtttgggtgaaaaaacacggtattttcttgtattcttagaagttattttagagaaataattttattaaacatattgatgaattgtaagctttatgaaactacattaaatattatgtaatctcttgtttgtatcagtgcataaacctgataatttgatacaaaatgcaattttggaaatatttttcttgacaagttgatgaaattttgttttaatacgcatcaattcggcgtgatagctcagtcggtagagcaacggattgaaaatccgtgtgtcggcagttcgatcctgcctctcgccaccatattaaaccccaagcagctgcttggggtttttggttatttaccgtttaaaaaagcacctgtcatagaccgatgcttgttataatgaagtatgacagtattagttaaagtcttaaagtccgccaataattagccgtacgcctacaatcatcaacagtacgccaaaagcacgcttaagagtttgagcgggtagagcgtgagccaacttggcaccaacttttgccatgataaaacttaaaatactgattgtaataaatgctccaatatgcacaaatccgatcaaaccatcaatattggcagtaccaacttgatgcccaaaccaaataaaaccaaatgctcctgccaaagcaatgggcaagccacaggcggctgatgtaccgacggcttgtcgcatgggaacaccattttggcttaaataaggcacagttaagctaccgccgccgataccaaagatggcggataaaataccgatgacaacgccagcaaacccttgtttataagcaggtggtggtggtatgtctagtctttcttgattggggaaaaacagcattttgatcgccactaagatagccccagcccctaaaattgcttgtaatgccgcaccgctaatcagcgttgcaacccaagcaccaaataagctgccaagtactaagccttttgacatattcttaaaaatctcccagcgtacaccgccacgcttatggtgtgcagtcatcgagctgatagaagttaagatgatggttgctaatgctgtaccaacagcaacatgaggtacgatatcagttggcataccatatgctgccaaaatccaaatcagtgcaggcacaatcaccatgccaccacccacaccaaatagccctgcacacagcccagcaatgataccagctgctgcaaaccagatataaatcatcgacattcatccattatttctttaaatttgtgctattataacgcacttttattatctttgtcgtaaattgtcatctgatgaatgttaaccaaagcaactttgaccaactgtggcaaaccatccaaaaccatcatgaacatcatgccagcatcttaagcacaaatactgagctaaaaaatactgtgatacggggcgaaaaatcgcacagcctgttacatctgatgacagctgaccaccaaagtttgggtcgtggacaacatggtcgttcttgggtgagtagtcaaggcgcggtttttttatcgttatatgtaccaatgcaaagtcaaacgcaggattttggtatcaatcaattatctggtttaatctctttgctggtgggtttttatttgataaaaatgccaatcataacacagatgaatcaaatccgacagacgatgaatttgccgaaaattggggttaaatgggcaaatgacttgggggtttttgatgaagattcccaaagattttggaaattggcaggggttttgatagagccgatttttgttgctaaaaatgaccatcgcagcttggtaggattggtttttggtgtgggcatgaatgttcaacacgcaccaatcattcaaagcggtacttatcaagcgaccagtctaaatatgctttggtatccatcattgggggcattgccatcagctcaagatttatatcaacccatttgccaagccatttgtcgggcaatttttcatcatcatcaattgatgacatctcaaaaaacagcaactggttttatcaatcaattcaatcagatgcatctattaacagatcgacaggtagaaatatttacccaaaatgatgatacgggtaatcgtttatcaggaaagtgccttggtgttgatgaacgaggggcgttattggtacaaaatgagcaaggcatacaaacaatctttgctggtacggccaagatgatgacttgaaaattttttaaatcaatctttttaaatagaaaaaataatcagaggcaaaatgagatggtgctgtggcttgatttgggcaatactcggttaaaatattggctgattaacaatggtcaaattatcttatcagatgctaaagaacatctaaaagcccccaatgaacttttattgggtttgcttggggtgtttacacaatttgagccaaattttgtaggaatatccagtgtattgggcgaaaaaattaaccatgccatcaccaaaactttaaaagagcttggtgtgccttttgaatttgccaaggtgaatcatcgccacccaatgctttgtagtcgctatgagccatcacaattgggtgtggatagatggttacagatgcttggtgcagtaaatggtcataaacaatgtgtggttggttgtggtacggcattaacgattgatatgattgatgaaggtgaacatttgggcggttatattttgcccaatgtttatatgcagcgtcatgcgttatatgcaggaacacagcaaattgatgttaaacaagggcgatttgatgggttaagtcttggtacgaccaccgatgacgctgtaaatcatggggtcttatttggggtggtgggtgctgtcgccagtgtgcaagccaattatccaaattttgagatgatattgacaggtggcggtgcacaaatgctaagaccacatctaaaacatattcaggtagacgaagagctgttattaaagggactgcaaagatatttttgttaattgttatcttgtcaatcttaaatacccatttgatatgccaaaataaaaagcatgatacaacagctcaatgaaaacatccatgtcactgaacgcaagatggataaattggttgcatagctcataataaaacagatgcgaaagataagataacctgttgccagtatattgatgatactaacaggcacaaaagtataaagtgcaatgagtacagaggctaagaaaattggcagactttcaaagctattggtctgagcgtgattgagtcttgcggcggctccgtgagtatttgccaaaaactcacgaggtgtttgattgtcttttatgttataaccacccaaatatttggcaagagcggcacacacaaaaggtaatagacaggcgatgaccatcaagatgatggtaagcttgatattggtatcagcaaacagtgcagcgatcatttctcaataatctcataatcatgagtgatattcaccccacctgatgataacatgcgtgaggctgaacagtatttttcggcagacagctcaatggctttggcaagctgcgattctttgatatcgctgccagttaccacaaaatgcaagtgaatatcggtaaatactgcagggatagtatcggctctgtgggcatgcatttggcaacggacatccgtgatgtcttgacgagattttttcatgatggtgacaacatcataactggcacaaccaccaagccctaataaaatcagctccatcggacttgcaccagcggttttattaccgtcaagatgtatggtatgccctgatggtgaagtaccaataaaatgtacgccatcttcccaaatcagttctgcgtctaattgtgccatatcaaactctttttatgttaaattttactttttatagcattcattttacttggtttggcagcgtttggcaaaccatttaccaaattattgattttagtttcgccaatcgatttttggacaagttaaattttggacgagttaaaatcttatcattatcaaaaattacgacccaaatgaggcaactgataggttggttaaaccaaaatccgatgtcagggtgcttggataaaaccctatacttttgtactgttttttggtttaatagacaacaagtcattcatcaaaagtttttgatgaaatttaaatgaatttggagctatctgattttggtacttatcatgaaaatccctgtttaaacatcaggataatcgtcagtcttcaagcaaaaaggtcaagtttgatggttttttatcaagcaagcttttgccattaagccataagatgtcgccatttgtcatgtaaccatgaatgaaaattgtcaattgttatcaattttcaataacaaggtatcaatgctgggtatctcctatatattaagagtttgattatgattgatgcagacggatttcgtccaaatgtcggcatcatcttggtaaatgcacacgggcaacttttgtgggcaaagcgtatcggtcatgacagttggcagtttcctcaaggcggtatcagtcatggcgaaacaccactagatgcgatgtatcgtgaactgtatgaagaagtggggctgcatcctgagcatgtcaaagtgctggcagtcacccgtgattggttgcgttatcgcttgcctaagcgttatttgcgtacagggcaggagcctttgtgcattggacaaaaacaaaaatggtttttgttatatctggatgaagctaataccaaatacattcgttttgatgtgggcgtacctgaatttgacgactggcaatgggtgagttattggtttcctttgacgggtgttgtaccgtttaaaagaaatgtatatcagcgggcattgcttgagctgattgatgctgtacccaaacgaaagtctttggtggcaaatatgtaataaatatgtaataagcgttaaaaccatcaccaaaattggtgatggttttttgctatgatttgagttttgcgattagcatacttaggcaaaatttgctaaaatacgactcttttttatcatctgtcttggtttttcatgcgcctaaaatctttaaaactggctgggtttaaatcctttgccaatcctacgacatttacttttcgacacgatattactgcgattgttggaccaaatggttgtggcaaatccaatgtcatcgatgcaattcgttgggtgcttggtgagacctctgccaaacagctgcgtggcggggcgatgagcgatgttatttttgcaggtgttgaagggcgagctgcgaagagtttggcaagtgttgagctgatttttgaacatacgcaagacgaaacccacggcattcgccatgaattaaatctatatcaagagctgtcactacgccgtcaagtcactaaagaaggtaaatcggattattttatcaatggtcagcgagtgcgtcgccgtgatgtggtggatgtatttttgggaactgggcttggtgcgcgtactatgcggtgattgagcagggtatgattgggcggattgttgagtcaagccccatgcagcttcgagaatttattgaagaaggtgcgggcgtatctcgctatcaggcacgccgtgctgagaccgaaaaaaaacttggcgaaacccaagataatcttaaaaggctttcagatttacaaggtgagctaaaaaaacagcacaaaacgctcattcgtcaagcacagtctgccaaacagtaccaagccttaaatgatgaattaaaaacgcttcaaaaagaagagttaatcagacgcttatttgaagcgtggcatcatcacgaacaaaaaaagattgagcagggtaaatcaggtgaggtgcttgccaagctagacgctaaagccaatcaagtacgccgtgagcttgacctactgtctgcgcgtgttgccgaggctcagtggctaaaagatgacgccaaagacaactatcacaatgcacagatggcagagcagaccgcacagcataatttttatacagtcaatagccaaattacccaaaatgatgaaaaaattgctcgcctacaggctcagcatcaagaagctttgaccaagataaatcaggcacaagacgagcttttacaaattaaccaatcgctagatgtcattacgcctaaagtagaagcgatgacgcatgagattacccatgccaagcaagctcaaagtgaggtgcagttgacttggcagtcgcaccgagatgagctaagtagcctaatgcaagaaaaaaataatcttgaaaatctcaagaaattggcacaatctcagcgtcagcgtttggagattggattaaataaatggcaagttcgttatgatgagcttatcactgccaaaaatctatttagcgatactattgaagtgcaaaatcagctgtctgctgataccttaaaagctgtggcactcagacaaaagcttgaacatcttaatgatgatgagatgctaaaatcacttgtagacgagctgactcaagcagtgcaaacatcccaaatccatgtacaaagccaagaaaaacgccatgccagtttgatgggtgaatatgaaattttgcacaaactggtacacactaaaataccgtctcataaaattacgacgccgcctgatgctgatacatcaatagccttaaatgcactgccaagtctaaaagaaagtttggtactaacagaaatgggtttggactatgcagatgttttggatcagtttttgggattttggttgaatgcccgtctaagcgatgaactgccaacggctgttttaggtcatgtgatggatgataatgattatatgatcttaaaatcaggcaaaacaagaaacacaacctataccgatgagatgttgtctcaactaccaacatcaatacaacagcaactggtgcgttttgatcgactgtttagcatgcctacgcttgagttatttggtcgctgttatttatatgtgggcgatgagccgctcacagacttggacacaaatgtaccatttggtatgataattatgacaaaagctggttggctggtgggcagttttggtatgttacacctttcaaaacttggtgataccagcagtcagtttttaagtgatcgaaaaaaacaccttgagcgactagaggtgctagaagatgaactaaacacacttgaagattcgcttgaaaaagaccaaaagcagctcaagcaagtactgacaaggcttcaaagcagtaaaattgagcttgaagaaatcactgcccaaaaaaatgtggtcacccagcagctgcaccagttagaacaaggcttgaccatgctaaccgccaaacttgattctgaaaaagcacgccgtgagagtattgacagtcagcttaagcgactggatgatgaaaatagcagtattaaaaatgagctacaagagcttaatatgcagattgagacctgtgattttggcttaagggagcttgagccaaaagttgagcaagcaaatcaagccatggcggtgcagacggtgcgtatcgacgaagctgttgctaagcttaaaacccaaaatgatacatatcaggctttacaaatcaaacttggcacactgacgcaagcaaaaacccatgccgagcgtttgcttgagatggcaaaacatagtgcatcacaaactcaagcggacattgagacaaccaaaagcacgcagcaggaactcagtcaaaagctaccagtgcttgaagaggcgtttaaagctgccaaagcggtaagtcatgagcttaagattgctagtgatgaatatgagttggcagccaaagcacagcaaattgcccaaagtcaattgcaagaaacgctgactgaggcacataccaaatttgccaccgctcaagcaactttggcacagatcagtgcagatacagcggttggtgaaagccgtgttcaagacattggcggtgagcttatgcgtctggatgaatcgtttaatttagcgtctaaactggcagattttcggacaaatcctaatcaaaatttcaccgataattcagcaaggcaaaatcaaatcaaaagtaaaattgctgagcttggtgcggtgaatttggcagctgcagctgagcttgccgagcttgaggcgcgtgtttcgcccatggatgagcaaatcaatgacatcacccaaagcatgaaaaagcttcaagatgccattcgtgcgattgacgaaaaaaccaaaacactgtttttgacagcacttgaggcggtaaataaagagctaaatgcactattttcaaaggtttttggtggtggtcaagcaagcttaactttgatggcagatgatgacttgcccaaatcggacaaatggcgagcagggcttgtgctgatggctcaaccaaagggtaagaaaaactcaagacttgctgtgctttcaggtggcgaaaaaaccttgacagcattgagtttgatttttgctatttttaagcagcaccctgcgcctttttgtgtacttgatgaggttgatgcaccgcttgatgatgccaatgtcgccagatttacagggttgattagagaattggctgatgatgttcagtttatttttattagtcataataagcttgccatgcaaatcgctgatgagttaaaaggcattaccatgccaaccgctggtatctcaagtttggtgacagttgatttacaagaagcccaaaaatatttagaagtcaatgactgaataaaaactgtccattatctaacatttacttggactttttgataagaatttgctataataatacgtccattttttaaatgggcgtattttttaaacttacactacacacacgaaattatttgaaatattggggtgtctgttggtttgaataattcgtcatcgtgacggatgcgtgctaatggattcggtattttggtttcgtggaggcgtaacccaaacttttaggattttttatgtcagataaaaacccaactcaaatctcaatgcgtgacttgttagaagcaggtgctcacttcggtcaccaaactcgtttttggaatccaaaaatgagtcagtacatctttggtgctcgtaatcgcattcatattattaaccttgagcataccgttaagcaatttaacgaagcactaactttcgtgaataaacaagcagcggctcgcaacaagattttatttgttggtactaagcgtgcagcgggtgcggtaatccgtgaacaagcacagcgtgcaggcatgccttatgttgaccatcgttggttgggcggtatgctaacaaactggaaaacacttcgccagtcaatcactcgtctaaaagagctagaaaagcaagctgaagatggtacatttgcaaaattgactaagcgtgaagcacttgagcgtacccgccaaatggaaaagctagagcgtgctttgggtggtatcaaagagatgggcggtttgcctgatgcgttgtttgttgttgatgttgaccacgaagccatcgccatcaaagaagccaaaaaccttggtattcctgtgattggtattgtagataccaactcaaacccagacaatgttgactatgtcattgccgccaatgacgatgcaattcgtgccattagcttatatgtaacagcgatggctgatgcgatcattgcaggtaaagagtacgctaaaacccaaggtcatgctgatgcagctgatgctgataagcaagccaaccgtgaaaatgcaaccgcacctgttgaagataaagttgaccaagctggtcaagtggttaacaactactaatttattaagcttggtttggcgtggtcataccaagcttatcctaaatttttgttcaattaaaacttaaggtaattgacatgactcaagtttctgcaaagctagtaaaagagctgcgtgaccgtactggtcttggcatgatggagtgcaaaaaagcacttgaagaagcaggcggtgatatcgaacttgcgattgataatctgcgtaaatcaggtcaagcaaaagctgccaaaaaagcaggtaatatcgctgctgatggtgcgattatcattgcccaaggtgaaggtaaagcgttgctactagaagtaaactgccaaactgatttcgttgctaaagatgaaaacttcactgcatttgccaataaagttgccaagcttgcacttgaaaacaacaccacagatgtggcagcgattgcccagctaccatacggtgatggctcaacagttgaagaagcgcgtgtggcattggttcaaaaaatcggtgagaatattcaagttcgccgtgctgaagtgattgaaggtgctaaccttgctgcttatcgccacggtctgcgtattggtgttgttgtctcaattgaaggcggttctgaagaagtgggtaaagcggttgccatgcaagtggcagcattcaatccgttggctgtgaatgaagctgatgtaccagtagatatcctagcccgtgaaaaagacattatcgaagctaaagccaaagaatctggcaagccagaggcagtgattgagaagatgatcactggtggtctacaaaagtatctcaatgaagtgactttggttaaccaaccttatgtcatggataacgataaaaaagttggtgatgttctaaaatcagaaaatgccactgtggttagcttcaagcgcctagaagttggtgaaggcattgagaaaaagcaagaggacttcgctgctgaggttgctgctgctcaagccgctgccaaagcttaattttaagctctttgacaaaaacccaatatgcttgcctattgggtttttattttgcctgaaatgatccttcgtttaattgtaaaaatcgatcatacagagtaaaatagtttaatgtatgaattttatcagattaaggaatttttatgtcatttcatcctgagcggtttattgaggttgccttaaaaaaccatgtgttgtgttttggtgagtttaccctaaagtcagggcgtaaaagtccttatttctttaatgcaggtttactatcaacaggtgaattattgagcgtgcttgcagaaggttatgcagatacacttgccaaacacgccaatcaagatgatctggtcatctttggtgccgcttataagggcattccttttgtggcagcgaccgctcaagtgttgtggcgtgagcatcagattaatgctgagtggggttataatcgcaaagaagctaaaaatcatggtgaaggcggtatgctggttggtgctgatttaaacggtaaatctgtttgggtggtcgacgatgtcatgaccgcaggtaccgccatgcgtgaagttattactttgctgggtaaagctggggcaagcgttgcaggtattattgttgctcttgatcgtaaagaaaaaggtcaaagtgatcgatcagccattcaagagcttgctgagagcctgcaagtgccagtgcttgctttggtgacgatggatgatattattgattatgttgcc

SEQ ID NO: 21 - DNA, 39003 bp, Moraxella catarrhalis
attttttaaattaattgcttcggaataattgtgcagctaattgtgccaactcatcttgattggcagataccatttcatgtttggcttcatgtttggcaatgtcactaaagtgtgctggcacaagatgcatatgataatgcagcactgactgacctgattcagggtgatttatctgcacttgagtgatgccttgtgtttgtagaacttgcctttgcgctttcatgactttttgagcggtggcaatgactgcttgagcatattgtaatggcaaatccgacaactcaactgctggatactttggaatgaccaacacatgcccaacagccactggcatgatatccatgaatgccaaagtctgatcatcttcatagacccgatggcaaggcaactcgccccttaaaatcttagcaaaaatattgctatcgtcataatgcgttgtcataatatcctcctgagttagtgatatggtcaccttattttagcacagcttggctggtatttgctcggattttgtcgtaaatttatgctatagtatgggttttaagatgatgcactaagatgaacaagaccgataaaactttaattttactacaaaatatttttaatgatacaggttttacctttcgtatccataatgttaaactggctcagttaaccattgattttgatttaccgcaaatgtttttagcacattatgaccaattggctgatgagttaaaagcacgcatacctctcaccccccagcttttaaagcacatgaatacaccgatgaccgccgatgaagcagaaaaattgcttgggctgccacatgcaagcatcgccaaagcttggcatatcaaactaaaaggtacggcagtgattgcatgtgatgcattatcgttggcaattcatactcactttaccaatactgccaaacccgcccaagttgcctatggtgataaacaaacactcatctatcaagaagcggcccgctggcagatgacaggtaatgtgaatgtcttatttaaacatacaaattacgatttggtgagcattgatttggaagataacatactgacaatgcatgcacaaggcggttatatacgcctaccaaatagccattcattagccacaacccatgcaatcaataccctaaagcataccaatcttgatgccattggttatttaaatgatgcaatcatcgaaaccatcaccgcagcccaacgataagccatttttataagccctagctgacaatgaatttttaataaccagcatagatatgcctaattattcattgattattctgagagattatctttgatttgagcggctttggcttgtcttttttgacgcattaactgtaagcgacgcttaagcgatgggttttcttcaatagattgctttttttgataagcttcccaatcaccaaaggggtcagcctgcatttggctttcattttgatccaaaatacgcactgcataatcgcctaaagtaaatttaatgtacaacacctgaacccaaacaattaccataaccatcaatggtgttgccaaagcaatgcccaaaatgcctgtgattgaacccataataacctgagataacagcaatgccactggtggcaaatctaccatacgattttggacaatcggtgagatgacatagctttcaagctgctgcaccacaacaatcatcaatgccacccataacaacatttttggtgagacaattaaagttaataataaaatcggtatggctgataaccaagggcccaaaacaggcacaaagtccagtaaaaaggcaataaatcccaaggctaaggcaaaaggaatgcccatcaaccaaagtgctatccctgtggcaatgccaacaaacgccatcacaaccagctgccctaataaccactgctgcatagaacgatagctacggtctaacaaatattctgccttatctcggctgtcttttggtaccatcgccacaaagcttcggcgataaacagatggagaaattgccaaaaatagcccaataattgtaattacgaccaaagttcccataccgctgaccataccgcccaaataagttggtagatacgccatcgcaccatcactaaaccgtgtcaaaaattgctgcggattatctcttagctctcttgcccattccaagcctgccagccattcataaacagcaggatgggtttgtaaatactgggttaaatattggttcatatattcaaatgcttgtggcaccaataattttaagttttctagttgaagtgccaactcatgcccaaacagtgccgccaaggtggacaaaacccccacaagccccatcaaaaccattgttaataaaataccatgtggtagttttttgagatattgaccaacccaaggtatcaaagttagatattcaaccaaacttaacagccaaaccgccattaaaattgaagcaaaaacaatcagccaaacatgtattaaataataaaaactcagtagcatcaagacgaccgctaccgtcataaaaataaacgacttttgttcttgtgtattcatagatttgccattagactttatttactaaagttttattcatctttaaaattgtgtttatcatatcatcattcatcaacataaaacccgcggcttgatgtctttatcaagccgcctttatcaatgactgttatagtgattatgattgagttgattggtctgatttaggcaagggtaacggcccttttaaaagatactcatcgatcatttcattttgagaattatgctcagcggattcttcagtgatgtaccactggctattgcggtacagcgtcaagcgatcacgacctaaaccacgccacagacaatacatcatcacaaaaaccacaatcgcaaacggcaatcctgccacaatcgccgccgcctgcaatgcaccaagtccaccagctgccaataaaaccgctgcaataataccttcagaggttacccaaaataacctttgaatttttggtggatctgtttcaccgccagccgtcaacatatccaccaccaagcttgcactgtctgctgatgtgacaaaccataacacaatcataatcataatcacaaccatcaagcctttggtgaatgggtaatgttcaatgaatctaaaaatagcactgccgtaatcagcttgaaccgcttcaacaaaaccatacgacccaagcatctccatatgaaccgctacgccgccaaaagttgtaaaccataaaaataaaagtagcatcggcacaaacagcaccccaaataaaaactcacgaatggtacgacctcgagaaatgcgcgcaataaaaatccccacaaatggcgaccaacttacccaccatgcccaataaaagatggtccaagatgattgccaatctgtatcaacataagcttcattccaaagcccaagcgtaatcagattgcctgcatagttaccaatattttcaataaagctgtcaaaaataaaccgtgttggacctgccaaaatcataaaagcaagcatcgccaaggtagctaagatggtaatatcacttaagcgttttacgcccttatcaagccccgccatcaccgacagtgccgcacataccgtaatcccagcgattaatcctagttttagtgttaaacttggtgtcacgccccatagttgtgccaatcctgtctcaagctgcattacgccaagacccaaagaggtcaccacaccaaacatcgtgccaaataccgccaagatatcaaccgtatgaccccagccaccataaatgcgtttaccaatcaatggaaataataccgaacgcacagacagcggcaatcctcggcgatagtgaaaatatgccaaagataatgcaaccaccgcatacactgcccacgcatgtagcccccaatgcaaaaatgaaatttgcatcgcttcaacggctgcattaaccgtctcaggttcggctctaggcggtgcggcaaagtgatataaaggctcagcagtaccccaatataaaagcccaatgccaatacctgctgaaaatagcatgccaatccatgaaccaaaactgtacgctggcacttcggtttgatgcccgagccgaatatcaccatagcgacttaatgccaaatatacacaaaatgccaaagcaagattcatcaaaatcaccagcccaaaaccaaaattttggctgataaattgctgcatttgtccaaatacttgccctgcttgttcactaaatatcgcaccatacagcataaatgctatgaccaaaaaagcagaaacggcaaagacagggacgctaacctttggaaaaacaccaaaccgacttatcttaacgccttgattcataatttgtatgtctttatgatttttttgatgagaaggtggttgtgatgcactcataagcccctcaatttttataaaattttaattaatttattaaattaatttaattaatatactgtgattattcagtttaataaaatgtatcaatgataaatcattgatattttgggacataagcctaacaagaataccgttttattgcaaattttgtgagatattattacccaaatttattacctaattttgagcaaatccttaccaaataaaatcaataaaattttgtttttataacaattttttaagttgggcgtgtgtatttagtttatatgtttggcttttgtaattttatgatataatctcataaatatcatttgataaatcagccaaaaaagcaaggcaaagtgaataagctgctattaataactaatagttatgtttattacaaaaagtcaaacaactttttggtatcaaacaatgctaaaatagcaaaaattagccaaattatgggctgcataaaaggtcaacgctgacaatcaaacaacccaaagccatcaaataaggaatatgtatgccaatttatcgctcaaaaacttccaccgcaggtcgcaacatggcaggggctagggctttgtggcgtgccactggcatgaccgatgccgattttcaaaaacccatcatcgccattgccaattcctttacccaatttgttccggggcatgtgcatcttaaagacatggggcaattggtcgctcgtgagattgaaaaggcaggcggggtggcaaaagagtttaataccatcgctgttgatgatggcattgccatgggtcatagtggcatgctctatagcctaccaagccgtgacttgattgctgacagcgtagaatatatggtcaatgcccattgtgctgatgctttggtgtgtatcagtaattgcgataaaatcacccccggtatgttgatggcggcgatgcgtctgaatattccgacgatttttgtctcaggtggaccgatggaagctggcaaagtactcgccagcactttggttgatggcagtaatgtgcatgaaacagtggtcaatgaccaagggcaatccattcgcaaacttgaccttgttgatgccatgattgacgcagcagatgatttggtcagtgatagtgatgtgcaaacggtagaaaactcggcttgccccacttgtggctcttgctcaggcatgtttaccgccaattccatgaactgtttgaccgaagcgttggggttgtcattgcctggtaatggctcactgctggcaacccatgccaagcgtcaagagctgtttttaatggctgggcgaatgattgttgagattactaagcgtcattatgaacagggtgatgacagcgttttgccacgctcaattgccaccaaatccgcctttgaaaacgccatgagcttagacatcgccatgggcgggtcaaccaataccattttgcatctgctggcagcagccaatgaagcgggtgtggcgtttaagatggcagacattgaccgtctgtctcgcttggtgccttgcctatcaaaggttgcccctgccacccaaaaataccacatggaagatgtgcatcgtgctggcggtgtgatgggcatattggcagagcttgaccgtgcaggattattagataccagcctgcccaccgtacacagccccaccctaaaagacgcattggcaacttgggatgtaatgaatcctgataatacgcaagctcgtgctttatacattgccgccccaggtggtgtacgcaccacccaagcttttagccaaaacaaagagtatccaaatcttgacttaaaccgtgaaagtggctgtatccgtgatgtgaaacatgcctattcacaagatggcggtttggcggtgttatttggcaacattgctgagcgtggttgtgtggtaaaaaccgcaggtgtcgatgacagtattttgacattcacaggcaaggcgcgtgtgtttgaaagccaagatgatgccgttgaagccattttggcagaccaaatcattgcaggtgatattgtcatcattcgttatgaaggcccaaaaggcgggccgggcatgcaagagatgctctaccccaccagctacctaaagtctaaagggctgggtaaagcgtgtgcattattgaccgatgggcgtttttcaggtggcacatcaggcttatccattggacatgccagcccagaggccgctgaaggaggtgcgattggtttggtcgaagatggcgacaccattcatattgacattcccaaccgcaccatcaacttggcggttgaccccacagaacttcaaaaacgccgtgaagcgatgcaagtgcgtggtaaacatgcgtggaagcctgccaatcgcattcgccatgtgtcccaagccttgcgtgcttacgcagccatgaccaccagtgctgacacaggggcggtcagagatgtcagtcaggtggaataagcataacttatttaaacactgactgcggtcaatcattaaaaccaaattcttgctggatttggttttatgttaagataccattttttgccaaaaacctgttcagataagcttatttatgagagataatgatgaaaattttatatgttaccgccacactaatgactgcctttaccctagcaagctgtgcaagtacccctgaaagcaatccaaaaaacagttctgctaatttaaccaccagcttaatcaaacatgcagtcaaacaaacctgtcaaacccagctgactggtcatcagtactggaaaattgccgccatgaaattgtcttcagaatccaaagccaagatttcagaaacggcatgcggctgtgtggctgataaagcacctgaagccgtcagcttgaccgagcttaccacagctgccattaatccaaatgcacgcactgaagttgcccaaaaaattgtgcgacactcgcttaaaccttgcatgctagagaccgtcaatgcttttattgtgccaactaccacacgctaatcaataaaaaaccatcttacacgaagatggttttggctttttcatttatcgactttttcatttatcgtaattgacttaaagaccgatttcaccgatgaatggtaaatggcggtatttttggtcataatctaacccataaccaacaataaatttatcttctacctcaaagccacaaaacttaaccgtcattggtatctcacggcgtgatggcttactaaccagcgtacaaatttcaatagaattaggctcacgagtttgtaaaatctcaacaacctttgataaagtacgacccgaatcgataatatcctccacaatcagaacatctttaccttggatttcactgtctaaatctttaataatcttgacatcgccactagaaacggttgttttattgatataacttgagacggtcataaaatcaatctcatgagttttgtcaatctgacggcataaatctgccatgaaaatgactgagcctcgcaataaaccaaccaacaccagctctttattgctgtcttgataatgtgtactaatttgtacacccaattctttgacttttgtggcaatttgctcacttgatatcatgattgttaaatcaagtggtgtactcataatcactcctaataaaaatattcagaaaaatcaattcagacaaatcgagcaatacacatgcaagcacattcatcacgccaaaagatgattttcttaaaaatactgtaacgccatctcagataacgcaaattgtcgcacatcattgagcatggtggtatcaaaattatgaataaatgcaaaagataagcgacggcttggctcacaaaaagcaaccgacccattataacccatgtgcccatagccatcaggcacatcttgcaggctaaacaatcgatgaaaacccattcgccaacgcatatttgcaggcatcaccgcatcaaacccatcggtttgtattgctctcatgcgtgataccacatcctttgaaataacggttcgcccttgccaaataccatcattggcgtgcatggcataaatccgtgccagtgcattggctgaagagacaccgttggcagctggtatggttgccatcaacacatcagagcgatgatattctagcccatctttggcatttggcatcagagcatttttataattggtcaaattcatacgagccgtgtcaaagtacaaacgattgacatgagcggttgttattggtttatcgcccaatgatgcacgccaaagcggactggtaggtagatgagttaaggtttgtaataaagtctcactatcaggcttaagtatcggtttgcgtctgggtgtatttttcttgggaatttcaccaaaataacgctcaggcttggcaattttatcaattaaatcagcatctactccaaaatacagctcatcgattacccccaacggtttggccaaatactgattgagtgcctgattaagcgtcatatcagtaacacgctccaccaatccaccaagcacccagcctgaaactaaggcactataagcactggcataatgatactcttcctgagattttggggtagaggtgggcatggcagcgatacgctttagcatctcatcccaatccagcaatacctcagcatcagttgtaaccacgctgatattaaataatcctgcagtatgcgataaaacatcttttaagcgaatgtcggttttgccattttgagcaaattcatgccagtattggcttatgcgtgcttcataatccaataagccttcagagacaagcacggcaattaaagttgccatcacccctttgccgattgaaaaattcaccgataaagtttgtgatgaccatggcaaatttggtaatgcaagccctgtggcggtattaaccacctcttgaccatctttataaatgaccaatgccccgccagcaggtgcatcatcaaattgtagtgcttgtagcacctgtgtaaagtcttcttcaagcatcgctatcatcgttgttaatttttatgaacccaagtttttatgaacccaagtgcttcatttaacgataaaatcaagcaccccaatgacacattcatcataaataggcaagtgtaccaattaagtgagctttttcgctgtctttggcatacaatccaaactcaataccaagctcatcgggtgtatcggtcattagctcaatctttgatggcaaaaatacaggaaatttaaatgagacatccatacgatacgccgctggtagctcaaaatgacgagcaatcatagccaatgagcgtgcctttgtccacataccatgtgcaattgctttcgggaaaccaaacactcttgctgacagtggatgcagatgaatcaaattaaaatcacctgacacaaacgcatatctacgaccaatatcctcttcaacgttcatcaccaaaaataagctgtcatctgatttatcaggtcttgaaaatacaggtttggttgtaccttgatgagtggcttgtctttgtactttggattttttttggcgagatagataggtggacaccccttcccataccatttcatctgccacccaaacgctggttacaaaatcaaactgctgacccttatcatgagtacgaagattattaagacgcaccgataggcgtactgtttcggtatcaaaaatcacacgatgctgggtaacgctgttttcaacatgcaccagtccaagcatggcaaaaggaaagtctggttttgccatcatgttcatttgtaaagtttgcgatagcaccgcaaaataagtcgctggtacccgcccatcatccacaaatccgcaaatcttacgatactcacgaaggttgctttgttcaatgacaagcttatccaccgtatagactgagcttggtaagtcttttgccttagtgtttgaagatggtaataagcttttgatgacattggcgtaggtcgtgtgcatttttggcaattcgctaaaatgtttatccgacataattttttccttgatagccaatgatggcttcataaattttatataaattagcaagttaaggcaatttatgcaccaagtaaactttgaccacagacacgaaccacattaccattaagaccgcctgctttgggtgataatagccaagcgattgtttctgcgacatctacaggttcaccaccttgactcatagagttcatgcggcgacctgcctcacgaatggcaaaggggatttgaccggtcattttggtttcaataaatccaggtgccacagcattaatggtgcgagctgaatctttaaataccttagctgttgcttcaaccaagcctatcacacctgctttacttgtggcataatttgattgccccaaattacctgcaatgcctgaaatggatgaaacacaaacaatacgcgcagcctcaccaagtccgtgatgattaatcaaataatcattcacacgatggatggcacccaagttaatattcatgacaagattccatttatcttcactcatcttagccaaagttttatcacgggtgacgcctgcattatgtaccaccccatcaagcgtaccgcaggcgcgtacaatttgctcgcctgcatctttggcagtgatgtccagcggtagtgcataaccaccgatttgccccgccactttttgtagatttggcaggctgtcaggcacatctaggcaatacaccttagcaccatcacgagccaacacctcagcaatcgcttgaccaatgcctcgacttgcacccgtgactaggatttttttaccctgaagggttgcgtgggtctgagtggcggctttggtcaaataaattggctgacctgatacataagccgacttagctgacatgaaaaattcaagcgtatgggcaagctcactttcagcacccttttgaacataaatcacttgggcagaaatcccccgcttaaactctttggcaatcgatttaacaaaacccagtaccgcacgctgtgccaaactaaaaccaatatcatcacctgtacaacattcagggcgtgcaatgacaagcactctgcctgatgctttcagacgccgagcaatcggatgaaaaaaatcatacacttgcttaagctcatccgtatttttgatgtttgttgcatcaaaaatagccaccttaaaacgagcattatcatcttttagacggtcattgagcgaagttgtttttaggtgatttaaagtggcatcggtattgactttggcttcatagccccccaaaatctctaccaaagcactctgcacagcggcatcttcaccgcttgctatgcccaaagcaacctcacctcgtacgacaggctgacctgtttcatagcggtcaagcttcatcggcatcggcaatcctaagtttttggcaacttttttacccaaaggtgactgaaccaattctccataatggtcgctcatgactaactcctaatttaatgaatgatgcgatcgctctgtacgatgacaaacggtggtcgcagcgtaacaaaacgataaaatataataatttattgtaccataaaatcatgaatttgaagaaaatggtgcaaacttaatactcaaaaatcatcattgatttatatttagttatacaaaatattttttgtataataaattgtaatcaaaaccccaaaatttcccacagagtgcgataataatgctaagctaagtcatgaatcgctcaagctttgataggattcggcttttcatttttactcacaatattaagaaggatattttatgagcttaaataaagttgccatcttaggcggtaatcgcattccttttgcgcgtagtaatggcgtatatgctgatgccaacaacattgatatgctcactgcagcattagatggattggttgctcgttttgatttggcggataaacaaattggtgaagttgtggcaggtactgtcttaaaacacagtcgtgacctaaacttaacccgtgaggcagtgcttaacacccaattacctgcaacgacgcctgcttatgatatctcgcaagcctgtggtactggactacaagcaacttttgctgtggcaaataaaattgcactaggccttattgataatggtattgcaggcggtacagacacaacctctgatgcaccgattgcattgggtgatggtctgcgtaagccgcttttgcgtttaggcaatgccaaaacagccaagcaaaaattgtccgcacttagcaccatcaaccccaaagatttattagccttcccccaaaatggtgaaccacgcactcgcctttcaatgggcgaacaccaagccatcaccgcacttgagtggaatatcagtcgcaccgatcaagatgaacttgcctataacagccatcaaaacttggctcaggcgtatgaatcaggattttttgatgacttaatcacaccttataaaggcttgaccaaagataataatttgcgtcctgataccacacttgaaaaattagccagtctaaaacctgcctttggcaaaaaaaatgccaatccaaccatgaccgcaggtaactcaacgccactcacagatggtgcttctgtggtgctactgtctagtgacgcatgggcaaaagagcatgggcatgagccacttgcttatatcactcaccagcagacagcagcggttgattttattggtaaagaaggtttaaccgaaggtcttttaatggcgcctgcttatgccgtgcctaagatgctaaagcgtgcaggtttgaccttgcaagattttgatttttatgaaattcatgaagcttttgcctctcaggtactttctactttggcagcttgggaagatgagactttctgtaaaactcgcttgggactagatgcaccactcggcagcatcgatcgcagtaagcttaatgtcaatggctcaagcttagcagcaggtcacccctttgcagcaacaggtggacgaattttggcgacagcagccaaactattggctcaaaaaggctcaggccgtgcattggtttctatttgtgctgctggtggtcagggtgttgtgtgtatcttagagagataattcattaacctttaaaataaaccctcattatccgaccagatgatggggtttattttgataaagtctgatatcataagccatgatttaacagcaatgttaatatattactcaagtacatccatttgaaaaaccttatctgagataatccgacccttactggtacgctgaatgtagccttgttgcaataaataaggctcaatcacatcttcaagcgtccctcgatcctcagccatcgctgctgccagtgcttcgacgccagcaggaccaccatgaaatctttgggacaacaccgataaataacgacggtccagctgatcaagcccttgcttatccacagccaacatatccagtgccgcagaagcaatatcagctgtagcgacaccatcacccttgatctcggcataatcacgcacccgtctaagcaagcgattggcaatgcgtggcgtacctcggctacgatgcgccacttctaacgccccgccgtcatccatcaaaacccccaaaagtctggctgaacgcttgacaatcgtggtcaaatcctcaacattataaaattcaagcctttggacaatcccaaaacggtcaaataatggtgcagataataatcctgcccgtgtggtggcagccaccaaagtaaatggcggtaaatccaatttgattgatcgtgctgcaggaccttcaccaatcataatatccagctgaaaatcttccattgcagggtataaaatctcctcaatcacagggcttagccgatgaatttcatcaataaatagtacatcacccgcttcaagattggttaaaattgccgccaaatctcccgctcgttcaagtacaggccctgaggttgaacgcaaattaccacccatctctttggcaatgatgttagcaagtgtggtttttcccaatcccggtgggccaaaaatgagcgtatgatctaacgcctcccctcttgctctggcggcaggaataaaaactttcatctgctcacgcacttttggctgtccgatatattcatccaaactgctgggacgaatagcacggtcggcggtatcgtcttttttggggtttgggtcaattaagcgattttctaacataatttttattttaaatgagaattaaatttaaatgaaagtaagtgaaagtcaaataagaagataacggcttattttagcacaaatccttatccaaaaccgctttaccacgatgctaaaaatcaagcattattatcaaaagattgaaaataagtatatcaagcgaaagaaatctccccaacttttgccaatgtgttaccaaatcagaagatatgctacaatacacatacatattatgtgggatttttttactaaaaaaacttatcataggcacttatcataaaccaacccaaaattgattgatctgataatgaaagtgctttttaaagcccatcttatggcgatattgcctcagcttgaagccatagcatcaagagacaacatgcgtttatttttatgccgtatgccaaacactgttcaacggcttgggatgatactcttttttatgctaagcttgagcctttacactgtcgctttggcaaattctacgacgcctcgttatcaacgcatctcaaccccccaagccatcagcacacaagagatctatctgacagcgacacagtatgaagtagcactaattcaagttctatctgaaatctgcccacccatgctcaatgctcgccaaaaagccaattttaatcgagcttatgacagacaattgcgtatttttatgccgtactcagctgacccctatcaaagcttaagacagcttagcgctcagcgtgagtatcgtatcattttgcataatgtgcgtgcatggacagccagctttcctgctagtgaaaatcgggcactttgctatgagtttgctgccgccgcttaaaagttcgctccacgctgcttaatttgatataataatatttgccaatatatttgataatataatagacaatataaaataaatcactcaaacacgctaagatttaagggcttttatgtatacttttaatcgtcaatttccccatactcgcttgcgtcggctacgcatctctgatggcattcgtgagatggtgcgtgagacacagttagcaccatgtcatttgattgcacctgtctttgtcattgaaggcatgaaccaaaaacagtccattcatagcatgccaaatgtccatcgctactcgattgatttgttgattgattatgtgcgtgaattatatgccactggcgtgcgtatgattgatatttttcctgtcattgaccccaagctaaaaacgcctgacggtcaagatgcctatcacaacgatacgctggcggtgcgtgcggtgcgtgccatcaaagatgctgtgccacagatgattgtcatgacagatgttgcacttgacccttataccacgcatggtcaagatggtattattgatgagtcaggctatgttatcaatgacatcaccaccgaagcactgattaaacagaccctagcacacgcaaaggctggtgctgatatcatctccccaagcgatatgatggatggacgcatccaagcaatgagacaagcacttgaaaatggtggctatgtcaatactgccatcatggcatattctgccaaatatgcttcggcatattatgggccatttcgtgatgcggtcggttcatcaggtaatttaaaaggtcataaaaaacaataccaaatggatcctgccaaccgtgcagaagcattgcatgaggttgcactagatatccaagaaggggcggatatggtgatggtaaaacctggacagccgtacttagatatcgtgagtgaagtcaaagatacttttggtgtgccaacctttgcctatcaagtctcgggagaatatgccatgcatatggcagctatccaaaatggctggctcaccgatgcagttattttagaaagtttaatcggctttcgccgtgctggttgcgatggtattttgacatattttgcacttgatgctgcccgtatgctaaacgactgataccctcaagtacgcacctaaaatcgcttcagcaacactgaagcgatttttattgtgatgcatttttaatcataagtatgcaaaagataagtttgatatcacctgaaaatttttcatataatcaactgggtttcacctaccgcaagtctaaaaatcatgctagaataaccaaagtttaccaaaaaatcgtgatatttggcgacgaagaatagcagctactaacgctatttaaatctgctaaattaacccaattataatggatatattatgacctcagcaacaagagaccaaaaggttgatgataccacttttaataccaatgccgacctacaaaaacaacaatttgaacaagctgcattacactatcatgagcacccacgcccaggtaaaatctctattacaccgaccaaaaaaattgccaaccaacgagatttggcattagcatactcgcctggtgttgctgttccttgccttgaaattgaaaaaaaccccaaacttgccgccaaatatactgcacgaaacaatttagttggtgtcattacgaatggtactgctgtgcttggcttgggcaatatcggtgcattagcctcaaaacctgttatggaaggtaaaggcgttttatttaaaaaatttgctggtattgatgtttttgatattgagattaatcaaaatgacccagataagtttatcgaagcggtcgcaagccttgagccgacctttgggggtattaacctagaagacatcaaagcaccagagtgctttaagattgagcgtgaattgcgtgaacgcatgaatatccctgtatttcatgatgaccagcatggtacagccatcattgccgctgctgctttgttaaatgctctaaaactggtgaataaagatatcgcagacattaaaattgtctgctcgggtgctggtgccgctgcaatcagctgccttgagcttatcatcgcacttggtgccaaacgctcaaatatctatgtgcttgattctcgaggcgttatcacaacacgccgtgacaacctagacgcctcaaaacagctatttgcccaagataccaatgcgactactttaagcgaagtgattgatgatgctgactttttcttaggtctgtcaggtccaggtattctgacccaagatatggttaaacgcatggcgggtaatccaatcatttttgcacttgccaatccaaatcccgagattatgccagagcttgcccatgccgctcgcccagatgtcatcatggcaacaggtcgctcagattatcctaaccaagtcaataatgctttgtgctttccgtatattttccgtggtgctttagatgtcggtgcaaccatcgtcaatgaagaaatgaaaattgcgtgcgtgcacgccattgctactatggcacatactgaagaaggcttattcgaaaccgataagaatacccgaagcaagcaatttggtcgggaatatcttaatccaagaccacttgagccaaatctcatcttaaatatcgcccctgctgttgcaaaagcagcaatggactctggcgtggcaactctacccattgaagactttgatgcttatcgccaaacattatctgagtttgtttataattcagccttggcaatgaagcctgtctttacccaagccaagcaagcaccaaaacgaattgtctatgctgaaggcgaagatgccaatgtcctgcgtgcggtgcaagttgtggttgatgaaaatatggcacagcccattatcattggtcgccctgatgtgattgaagcaaaaatcaaagagttgggtttgcgtttaacaatgggtgagcatgttgaggtggttgatatcaataataacccgaaacatgaacaatactggcaacattatcatcaagccaaccaccgtttgggtgtctcagctgagcttgctcgccgtgatatgcgtcgcaaaagctcgttattaggggcaatgatggttgaacaaggcgacgctgacggtctattgtgcggtacatttggttattatgatttacacttaaattatatccgccgtgtcatcggtaagcgtcaaggtgtgagtgattactatgccatgagcggtgtgattttacaggatcgtacgctgtttattgctgatccttatattcatgaaaatccaacagcagcacaaattgctgagatgacggttttggccgctcaaagcatacgccgatttggtgttgagcctcgtgtggcgttgttgtcacattctgattttggtacttctcagcgcacctcagcagttaagatgcgtgaagcttatcaaattttatgcaatatgaatgttgattttgagtttgatggcgaaatgcacggcgatgccgccttagatgtgcgtgtccgtgaacaaagccatccatttagcacactacatggttcagccaatctactgattatgcctacattagatgccgcacacattgcctttaatctacttaaatcaagcagtggcagctcggccatcggtccaattttattgggtgcagataagcctgtacatatcctagtacctgcatcaacagcacgccgtatcgtcaatatgactgctattgttgttacagatgcccaaaaagtagatgtttaattaaatcacctaacattaaatgccagcttggttgctggcattttttattggatttttgaaaaattattgttatatttaattattcatctttataaggattatccatgcaagtatatttggttggcggtgctgtgcgtgatgctgtgcttggcttgcccattaccgataaggactttatggttgtgggtgctacgcctcaggtgctgcttgatttgggatttatccaagttggggtagattttccagtatttttacatcccaagacacaggcagagtatgctttggctcgcattgaaagaaaatcaggtgtcggccataccgcttttcaagtacacgccgatccaagcgtgcgtcttgaagaggatctcattcgacgggatttaaccatcaatgcactggcgattgaggttaaaggcttatttgatgagacacccatgacaggcaaggtcattgatttttatggtgggctaaccgatatccaaaatcgcacgcttcggcatgtctcgcctgcatttagtgaagatccacttagggtgttgcgtgtggcaaggttttttgcccgttttgcaccacttgggtttagcattcatgatagcactgccaagcttatgcaagacatcgccaaatcaggtgagatgagcagtttaagccgtgagcgtttatactctgaatttgttaaagctatgcgacagccacaaggcgatcaatttattgcctgcctgcaccaacttgacattttgcccttcattttgcccacattagcacagcattttaacacaccacaaaaccgccaacgcaccttcacacggctggctttagcctgtacgctgaatttgcctatttttagtcactttgcgatgttgctaagtgatttgcccaaagatgacctaagcgactgtctgaatagactaaatgctccaaaaagtattcggcaatttatacaaacctttaatcatttccatgacacattcatcgctttacccaacatctcaggcaacgctttgcttgaattgcttgaacgcacgcaagcacataaagacagcacaaaactgatacagctttatgacgcttgtcatgcctaccaaggcagccctctgagttatcccaagcagtggctatttgatgccattacttgctaccaaagcatcggtattgccgacattgacccaactttaacaaaaaaagccattggtgatgccctgtcatatcttagatgccaagccttgcataaacttttaagtaattttcaaaaaacatctgtcgctgggctttgacaaaaaaggaaaaatcatgatgaaaacagcacttatcacgggcggtgccaagcgtattggtgctgccattacaaatctactacaccaacatggctttaatgtcatcattcattaccataccagtcaagctgaagcggacaaattaagccacacactcaaccaaattcgaccaaattctgcaacaacgctttgtgcgaatttagacatcattcatcaccaagaacaactgtctgaatttagcaaactgtgcattgcccaatttggtcgtattgatgcactcatccataatgcatctagtttttatccaagtgatttaaacgatacacatcaaaccctacttaagcattgggataatttattcttaaccaacgccaaagcaccgttactgcttagtcatgccttattgcctgccctcaaaaaatcacacggctgtatcgtaagtttattggatattcatgctgatgctaagccttttattggctatcccatctataatatggcaaaagcagcacaccgcatgatggtacaaagcctggccctcgagcttgcccctgagattcggattaatggagtgtcacctggtgtgaatattttccctgaaaatcatcattcttcatttagccatcaaataaaatccgacctcatcgcctctattccacttgctcgtattggcaccccagaggagattgctcaggccgtcttatttttactaaaaagctcctatataacagggcaaattattgccatcgatggcggtcgcagcctgaccttaaagggtggctgatacacagatattagacagttggcttaaatttaagataagatttttaacaataaaccaccaaaataatgcaaaaaattgctgacaaattaaagattttaggctaaaattcacacgtgcttacatggttatcaatttaccgttacattaggtcaaattggtagcctctttattttgtttaacccttgaaattttcggagcagatagcctaatcgaacaatcgccaaatcttttggtacgatgaagctaagttctcttttgtgttcgctgcatttatgcacacttaaaaggaaataccatcgttgaatacttctcccacttcaaatgtcgctcgtctacagcgaaaccttggtttatggcatgtgatcattatcggtcttgcctacattcagcccatgaccttgcttgatacctttggtgtggtatctcgtgatagtagcggtcatgtacccatgtcgtatatttttgctttgattgcgattttgttgacttcggtgagttacggtcacatgattcgtgcttatccttcatcgggttctgcttatacttatacccaaaaatctattaacccatcaatgggctttatggtcggttggtcaagttggcttgattatttattatctccgttagtaaatatcattttggcggtgatttatttagaagcattattccctgcggtcaatcattgggtttgggttattggtttgacggcactgatgacgggcgttaatctttttggctcaaaagctgtggcctattttaacagctggattgtttttgtacagctggctgtcattgcagtctttgtttttttaacttacaatgctctgtcagcaggtcaaaatgccgatggtatcattagccctgaaaatgcttaccatctttggagcatggcacccttttgggacagcatgacctctgttgcagcactcattacaggtgcaaccattttgtgcttctcatttacaggatttgacgcactctcaacattagctgaagaaaccaaagacgccaaaaacactctaccaaaagcaatgattttaacgactttgattgctggcgttgtatttattatcagcacttattttatgcaactgtatttcccaaatcatccagaaacttattttaaactcattgatgaaacacaacctgaaattttagaggctgttggtggtgcggtatttaaggcggtggtacttggatttgccatcgttacagtcatggcatcaggaatctcagcccatgcaggcgtttctcgcttgatgtatgtgatgggtcgtgatggtgtgattagcaaaaatatttttggtaaaattcacccaactttatttacacccgtcaataatattctcatcgctggtgttgtcgcactaaccgctggctttgtcacatttgaatcggtgataaatctaatcagttttggtgctttgacagcatttagctttgtcaatatttctgtgttattccattatgtctttagaaataaatatgtgcataatgcaaaagatgtattaagctatatcatcgtaccaattgcaggctttatcagtgtgtttttaatgtggttaaaggttgacaaactaacctttgaagtgggtctattttgggctgccattggctttatctggcttggcatcaaaactcgtggttttaaagcacctgtcccacagtttaaagaagaagatgtttaaaatcttaataaaaaatatccttaataaaaaatatccttaataaaaaatatccttaataaaaaatatccttaataaaaaatatccttaataaaaaatatccttaataaaaaatatcccaggtacttttgggatattttttattgatagattggtcaaagctgaatatatttagtcttctaaatttaatcagatttgactgatttgaataaagacttaaggtgtgatggtctgcccaatcacctctgccagttcaagaatttctgcttcgctcatatcttggctggtcgccaataatctttgtgaaatctcatctgctggctgattatccgccttgggatataattttggtaaatctagcatctgccgcaccaaagcactctttagggtatcacgccgacccaaataacgctgataaaagcttgaatttaacaaacttgcaccaccttgcccaaccgcatacaaggttgccatatagtcacgaatattcatctgactgttttgttcggtcaaatatctttgaacaatacaagacatacgaaccattcgttctcggcgtacatggtataattgggcaaacatcttgtttaatccagaggttgttgatgacaggcgttcttcaatatgattaaataaaatcgcacggtgcggtaaattgaccaactgaatcacaaatcgggccacgccagccccagcaccgtcttcaacaacaatcatatcaagttttcgcttttcataatcaatcaaaatccgtaacagcagttcatctttactggcaaaatgcttataaagcgttccttttgccaaatccaatgtcaaagtaagctatctagtgtcaaatccccctcgccagagtcaagcaataattgctcagctgtttgcaaaatacgcatctcccgcaactcaaattgttgcttgcgattggtcatgatatgtcctttattcaatacaaatatttaatacaaaaataactatcaaagattatagcaaaacacaataaaaatgggtgatacttttttacctcgtgtattgttaaaccattgttattgatgatgaataaaacacaaaattcaaacaaatgatgccgtgattgttacaattttacccacaaatgatgtgaataattgttcacatttagacggttttgtgttagcatattttcgtatagaaattcttctgaatatattgataatacttgcctgacaacatataattatcatcaatgttatgtaaatattcaaaatgaattttctattatttacaaactttatctaaattataccagtttgttacctttattataggatacttacctttatgagtattgagcgtaattctgaagcgtttgagcaagcacccatcaactgggtacctgccattgtgctattatccaccttgtttcttgccattactatcgtgccttggtatctatggacgcatggtgtgggcatgggcgtttgggtggcttttgctattttaatggcttggacgggtctgtctatcactgctggctaccatcgtttgtggtcacataaatcctatgaagcccatcctgttgtcaaatatattttattacttggtgcgactttggcggttgaaagctcagtatttgactggtgttcagggcatcgctcacaccatcgccatgttgatgatgaatatgacgacccgtattcttctcgtcgtggtttttggtttagccacatgggctggatgctacgcaaatacccaagcggtcaatatgattacaaaaatatccccgacctaaaaaaagataagctacttgccctacaacacaagtattatggtttttgggtaattgccactaatgttgttattctagcgatgattggctggatcacaggggatatgctgggtacatttttagttgcaggtcttctacgcttggtattgacgcatcattttaccttttttatcaactcgctgtgccatatgtttggtacacgcccttataccgatgagaataccgcacgggacaatggcctacttgccatcgtgacttggggtgaaggttatcataattatcatcactattttcaatatgactaccgtaatggcgtcaaatggtggcaatatgacccaaccaaatggatcatcggtctgcttgccaaagtaggcttggccagtaatttaaagcgtgtcgatgatttgaccatcaaacatgcagagctgaccatgcagtttaaacgcgcccaagaacgcatcgtaacagggggcgaaccaagtttagatgagcgtttggccgcctttaaagagcgtatcagtgccgagtatgatgaatttaccaaaacggttgaagaatggcataccctaaaagccaaagcgattgagctaaagcgtgcagaattagctgaccgattaaatgaagcagatgaaaagctcaaagcacagcttgcccaaattgaaactaaaatcttagagcaaagtaagcgtgttgaacaggcatatctacaactcaaaggtaaagccatctgattgatattacttgttttctccaccctttatctatatattggataaagggtttctttttggttatcaatcaccttataataatagcttaactttatgaaatttatccatgattatctaaaacatgacgagcgactatatcgctacacactgcctactccccttgataatcctaagctggtttctttaaatactcaattaatcgaccaattaggtttatcatcacttgatgcgactgcttggactgatatcatttcaggtcgcctatcgccattaactcagattgccccacataagatacaacccatcgccatggcgtatgcaggtcatcagtttggtcaatgggcaggtcagctgggtgatgggcgaggcgtattaattgcccaattgcacaataaaaaaacaggcaaactgattgatttacacctaaaaggtgcaggtctgacctcttattctcggcgtggtgatgggcgggcaatgttagcaagctgtattcgtgaatatcttgggggtcatgcgctcaatggtttaatgattgcatcttctgatgccattggtcttgttgtttctgatacccatatccagcggcgtcatattgaaaaagcagccgctttacttcgtgttagcgattgccatgtacgccttgggcactttgaatgggttgcgatgtatgctgctgattattttgagacatttgtcattaaaattatccaaagctattatctacatctgtatgatactcatcaaaacaccgctaacattagtcaattattacatgaaattgccgccaacaccgcacgcatgattgccaaatggcaactgattggtttttgccatggtgttatgaatactgataatctcaatatcacagggacaacactggattttggcccttttgcattcatggagggttttaacccaacttggattaacaatcattctgatcatacaggtcgttatgtttatcaaaatcagcctacgattgggcattggaatttggcggtggtatatcaccactttaaaagacttgtcaatcaagatgatattgatgatgcgctaatgacataccaagaggtttttgaaaatacttatcatcatggtctatgccaaaaacttggtatcaaacccagtcatcaagccatacaattgggctatcggctgctgatgctgatgcaaaacgagcgtttagattataccaatacatttcgtgctttaatcgcagttgctgatcacggtgagaatcgtacccaatttacacatgaatacacgctgctggctaatttgacaaatatcttatctgcgacatcttatgatatttggcaaaattgggttaatgattatttagattgtctcaagcaacagtccaccaaacaaacggctattaagacattacaacaaaccaaccccatctatattcttagaaatcacatggcagaacgcgctattgtatctgctcatcaaggcgattttgatgaagtggcacgattatttgcattgctagataatccctatcaacagcaaaccattgcaaccgttgatgatactcgcatggcgtttgccaatgaggttgtcgcagtcagttgcttgtcttaatcagcttatccaaatttagctatatcaaatttttaaagccaaacctatcagctatttattggtaaaaaaccaaaatgatgaggtcatttatataccagataaaatcatttatgctataatgggattaactttttataaactgaggcacgccatgctcagtatttatctgttaatcccattaagcctgatgctttttgttatagcaatttgggcaatttattatgcagttaagtctaatcaatttgaagatttggataacgcctctgaacaaatcattttagacgatcgacaagcacgccgaaaaacaaagcgtattcataaggaacagcgatgacatttgcactaatttttgctgcttttagtatgggtctgcttggctcaccacattgtttgggtatgtgtggtggtatcgtagcagcctttggtatttctatgaaaaatacctcgcctgccaagcgaactttattgatgttaggctatcatatggggcggttgggtagctatacgattttaggcttactggttgcagccttgggtaagcacattttagcacctttaatggccaacagtgccttacccaaatatttattgggcggtgctttggtttttgctgcactgctcatgttggggctaccagtactcaatcgccttgaaaaagcaggtctaagattttggaatacactggcacctttacgcaccaaagttctaccgatggatagcttgcctaaggcattgatcgcaggtctgctttggggatttttaccctgtgggcttgtttatggtgcattgggcgtggcattgggacttgcctctgacagtcaagtaggattgacagcaacaacctttatggtatttttttggtttggtactttacccatgctacttgccacaggcacagtcatcgcttggctaaaatccaaaatccacgcatttaatctacgcaaattcagcggtgtggtgatgctcatatcaggattagcaattgcctttagcataccaatcatgcacaaattacatggcgaccacgcagaacatggtcaccatcaccatcaccattaccacaccagcgacgagcatattcatgatcaagtaggtcatcacagccatcaacatcacggtgaagcacctgcccacaaccacgatcactcatcgcattcagatcgaagccattcgcattcgtatcatcattaattaaatagatgctttatcatgcaaatcaccttatcccaatttaggcattaagatgatttgcatgaaacttaatatgtacttcaataaaacttgcaacaaaaaagtaactgtggtcatagccatcatgcaagtttagttccacattaataccattttcttgggcagcggcaacgaactgttcaggctgcaactgatttggataaaaatcatctgccaagccttgatcaatgtaaatgggtggagctttggttgctttggctaccaaataagtgctgtcatactcacaccaatcagactctttttcacccaaatacgctgtaaatgctttttgaccccaaggcgtcttagacggattaacaatgggagcaaaagcagaaatactggcataagcatcagggttttttagtccaatttgtagggcaccatgaccgcccatgctatgcccacagattgccttttgtccgacattgaagttcttctcaatcagcctaggtagctcatcaacaatataatcatacatttgataatgtactgaccaagggctggcggttgcattgacataaaatccagcaccttggcctaagtcataagcttcatcatcaggtacggtttctccacgaggtgatgtatcaggtatcaccaaaattataccgtacttagcagcatactgctgagcgcctgatttggtcgaaaaattctcatcattacaggttaaccctgataaataatataatacaggtaaacaggcacctttgagtgcctgctttggtagatagaccgcaaaggtcatctcactttggactgctttagaaacatggcgataacggcgatgctcaccatcaaacattttatgacagctgattaattccataagtcacccaagttaaaaatggattacactgcgaattgatttgccttcatgcatcagatcaaaagcggcattgatttggtcaagtggcatggtatgggtgataaaatcactcaatgcaaaatcaccttgcatatattggctgacaataccaggcagctcactacgacctttcacatcaccaaatgccgaacctcgccacacacgcccagttaccagttgaaatgggcgtgtcgaaatctcagcacctgctggtgcgacaccgataatcacgctctcaccccaccctttatgacagcattcaagtgctgctcgcatgacatccacattaccaatacattcaaatgaaaaatccacaccgccatcagtcatctcgatgataacttgctgaatgggtttgtcaaatttattaggactaacacagtctgtcgccccaagctcttgtgctttggcaaacttatcttcattaatatcaacaacaataatgcggccagcccctgccatgcgagcaccgatcaccgcggcaagtccaataccacccaaaccaaaaattgccaccgtatcaccgggctttactttggctgtttttagaactgcacccatacccgtggtgacaccgcaaccaagcaagcagacctcttctaagggtgcatctttttgaatttttgccaatgaatactgagataccacggtatactctgaaaaagtcgatgtacccatataatgataaattggctcaccttctttaaaaaatcggacagtaccgtctggcattaagcctttaccttgggtttcacgcactgccgaacaaaggttagttttattagataagcacattttgcactgaccacattcggccgtatatagcggaatcacatggtcaccaaccgcaaaatctgttacgccctcgcctacagcttcaacgatacctgcaccttcatgcccaagtacacaagggaaaacaccctcaggatcagcacctgataaggtataagcatctgtatgacaaacacctgttgccacgatgcgaaccaatacctcaccagcttgtggcggcatcaaatccagctcttcaattaccagcggctcatttgccgcccaagcaactgcggctcgtgttttaataaagtccatcatcggttcctttggttaatacatgtcacacaaaaacacatgtgtcacacaaattgattgcccttggtcatattcgtttcaggggttgctattatacttgtttaaaccgaagataaaaaccgtcagttacattcattaaaataaaaacaacctgtattgacacaggttgttctttgatcagcgatgataaaataatcgataataaaataatcaatcacaaaatgccataagcgactaacgcattggcaacctttaaaaagcctgccacattagcacctgtcatataatcaaccacatctttggttttaccgtactcttttgctgcagacaataaatcatcatggatatttttcatgatgccttgtagtttttcatccaactctgagaaacttttatattggcgtacagagttttggctcatctcaaggcccgaaacagccacaccgccagcattggctgctttgcctggtgcataagtgatgccatgactgcgtacgatatcgatcgcttgggcatctaatggcatattcgccccttctacaacatatttgacaccactttcgaccagctgcttagcctcttgttcacagacttcattttgcgtagcacatggcaatgcgatatcagcagcaaactgccaaggttttgtatctggcaaccattcaccaccaaatttttcgacataatcacttaacggtttgcgtgcatctttttgagctttcacccagtcaattttttcttgagtaaaaccttcatcgtcatgtagcgtgccttgagagtcagaaaaagtgatgactttaccgccaagatgcaaggctttttcggcagcatgttgggcaacattacccgcacctgaaaccaaaacagttttaccctctaaggtatcgtcattggctttgagcatattatccaaaaaatacaccaagccatagcctgttgcttcattacgaatcaagctaccgccaaaacctacgcccttacctgtcaacacaccttcatgtttacgcgtcagatttttatacatcgcaaacatatagtttacctcacggctgccaacaccgatatcacctgctggcacatccatatctttgccgatgtttttgtgcaattcacgcataaaagcatagcaaaaacggcgaatttcagcatctgatttacccttagggtcaaagtcagaaccgcctttgccaccgcccattggtaagcctgtcaaagcatttttaaaaatctgctcaaatcctaaaaattttagcacgctttcgtttacggttgggtgaaaacgcaaaccgcctttataaggcccaatggcgttactaaactgcacacgccagccacgattgatctcaaccttgccttggtcattttcccaattcacacgaaagcttataatgcggtctggctcacaaagacgctcaaacacctttaactctgcaaacttaggattattctcataagcttcttcaatcgtcatagcgacttcttgaaccgcttggatgaattcgggttgatgggcgtaatttttttctatttttttaacaacagattggatactcatgtgataaatcccttagattaatggaagcaaggttcgccaatgtgatttgacgaacagtttttggcttttattgataagtaaaatacactttatcaattataaatcataaaaaattatgatactataagcaaatgtaatatacagaaattttgggcagattacaagtgatttttagagaaatacccaccattttaaataaaaataaccgttaaaatatcgtatttatatgaacttttatgccacaaaaaaccgctgcttactttggtgtaacagcggttgttaagatatcatgacaatagcccatttactattaattcaagacagacttggtatccgtcactttatcaatcaatccataaggaatgctgatatttggattgtcctgatgatgaaataacgccttttgcagctcaggtagggcaagctgcatggcttcaccaataaccaactgaggctctgaaggttcaaaacccatcaaaatctcacgctctttaatcttgggcagggcatcataaaaagctgtcattaccccatctgagcgtggcagactttcattaaaaaatgctcgaccaaaataagtcatatccgcatcatcagtacagccaaaagaagctttatccgccttagacgctgtgataatcatcgtataaggatcttttaacgcattgataaaagtgcctgaatagcacgccgaaacaacaatgacacgccaacgaatgcctgatttatccaaagcggattttaaccaaaatgggtcaatctgacgcaaattcatcgggggatttgttaccgccaattcaccaatcggctcaccatgttcatcgaccgacccgtgtgagcttaataccaaaaataaagcatcttcatcagggttcatcagtccgccgatatgctcaaggcttcgctcaatgctggcgcgtgtggcaatggggtactcgccccaagtgcttgggttgttaatcaaagcaatcgaacgccctgccgtatcaaatttgacatcaaatagttggcgtgcttgaatgatctcactggcaaagacatcttgctcgctgtagctggctgcccccaaaaaataccattcatgccgacccttgcgacctgccttcatcgcttgcaactgcttgggcagttgtgctgcttgctcataaaataccaactcatctaactccaccaaaacctcatccatcttgaaaataggctgattgatggtgtttttttgccaaacaaccaataagacaatgcttgcaatcaacatcaagacggtttcataccaaggccaattaaaacgcttagcaaaaatcagtaataatgccgctgtctgccatacaaataataataaaaacagtgtgggcaaaatgctatgaagccaaaacggcaataggctttcattttcaagaaattgtatgccactttgaaataaaacaagcaaagtatctgccgccagccataatattgctggtacaaataacaaggcgtaatttaatgaccgctgtgcaatgataatacctgcagcaacaatgatggttggccaaaccaaatagctgattaatccttgctcattaaaataactgtcattgggtgcagcaagccaagcaaataaaatatttgctgataatgcgaccaccataaaagcgactgcttgagcaaaagtcggcttcgtaagcctaaaagcacgctcactaccgacaagcatccataaagacgcacccagatttgagaagaaatttgacaaaaaacccattgaatgctcgaaagttaggttcaaaaagtttgaccattgtaacatattgcaaaataactcaaagcataattttacatcaagcatccaaaatgctttaacgctttaaatactttcacaatttaacagatagctattaatacaatatcattttttaatccgtttaatcatatacacccaaaatcagtagataaaaaaaccgccatgaatcaacagttatcattggcggttttaatatggcaaaaattagcccatcaaaagcttattaacacgctttagatagcctgctgggtcatcaagctgaccaccatctgccaataaagcttgatcaaaaatgacttgtgccaagtcatcaaaatcatggctattttgcagtttatcaatcaaaggatggtttgggttaatctcaagcacaggtttaatctctggtacactttgccccatggctttgagcatctgtgccatctgtggcgtaagctcaccttcaccaacaaccaaacaggctgggctatctaccagacggcttgagacacgcacatctttagtacgcttgcccaatgttgtttttaatttttcaaccacaggctgcattttttcttcagcctgcttggcttcctgcttttcattttcatcggtcaattcacccaagtcaacagcacctttggcaatattttgcaatggcgtaccatcaaattcatgtaaaaagttcattgcccactcatccacacgagcagtcattaagataacttcaatgccttttttcttgaataattcaagctgtggactgtttttggcggccgccaagttatctgcggtgagataataaatggctttttgaccatctttcatgcgggctttataatcaccaaaacctgttgcaatcttatcatcggtactggttgcataacgcaatagcttggcaatgcgttcttgattggtctgatcttcacccaaaccttctttgagtacatcgccaaattcttgataaaaatcggcaaatttttgttgcttatcagcatcttcagagttggcaagacttgatagtagcgtcaatacacggcgagcattaccctcacgaattgccttaacatctcgtgattcttgcaagatttcacgactgacattaagtggcaaatcagcagtatcaatcacccctttgacaaagcgtaaatacatgggtaataactgctcagcatcttccatgataaatactcgtttgacatacaattttagcccatgttgctgttcacgagcgtacaagtccatgggtgctttacttggaataaataaaagctgcgtgtattgcactcgtccttcaacacgattatgcgtataggctaggggcttggcataatcatagcttaagtttttataaaattcatgatactcatcgtcgctaatatcgcttgggctttttgtccacaacgcattggcttggttgactgtttcatagtcatcggtagtaatgtattcacctttgcctgtcggttcaccatcttcacccagctcatcttgccaaatttgcttatgcatttgaatcggcaggctgatatggtcagagtatttatttaccagtgattttatgtgctggtcgtttaaataatttgtctcactctcgccgccaccagcatactcatctttaagatatagcgtaattgatgttccacgattgggtttatgaatgctctcggtggtaaattgccccgtaccatcagacacccaacgcacgcctttatcagcagattcgcctgctttacggctttctacaacaatcttatcagcaacaataaatcctgaataaaaaccgacgccaaactgtccaatcagatgaccatcttttttatcgctatcagccaatttatccaaaaatgccttagtgccagattttgcaatcgtacccaaatgctcaatggcatcctcttcgttcataccgatgccattatcgctaaaggtaatggttttggcagtattatcaatgtcgatacgaatcgcaagctcgccatcattttcatacaagccatcatcagaggttgccaaaaatctcagcttatcacaagcatcagaggcatttgacaccagttctcgcacaaaaatatcagcatttgagtacagtgaatgtgttaccaaatgcaatagctgtgacacttcagcttcaaaatgatgagcggtaggattggtcataattttcttcctataacataacaattgtaatgagtatttgatcaaatacttgatttcgttttcgcttatcaagatagggatgatgaatattttttcaagcaaatgttagataaaatattgatttatcatcatattttattacccaaatgatagatgaattttattgcttaaaactttcaaataaaatcaatggtggttttgtttagccatagaatctatattcattaagcataacatcataaaataatcacagttactaaacatacaaaaaaccatcaccacacgaaattactaataaaaactagctattctatctacaacctagtaaaataagaaattaggtctatagcaagcaaaagaatttatgtctaaaaacactttttctgcgtcattcatcgccattttatcaaaagttattttgggcgtattggcattatttgcaatcttaattttagcatttcccattgggttttatggcatggtcatgtatcttgagccaactttgcctgatgtcaaaaatttggacaattcccgctttgagatgccgctacagatttatactgccgacaacaaactgatcggacaatatggtaatcgctactctttgcctgtcacctttgacgaaattcctgagcgtatgattcaggcatttttggcagcagaagacgatactttttttgaacacagtggcatcagtgtcaaaggcatgggacgagcattgaccgaagttatcagtgataatgacgctcaaactggtggttcaaccattaccatgcaagtggcaaaaaactattttttaagccctgagcgtaccattaatcgtaagctgaccgaactttttatcgcccgcaaaattgaaaatgaactcacaaaaaatgaaattttaacactatatgttaataaaatttatttaggtgaaggcacttatggtattcaagctgcagcacgccgctattattccaaaaatctagaaagcttgaccattgcccaaatggcgatgatcgcaggcttaccaaaagccccttcggcctacaatcctgtcgttaatcctgaacgggctatggagcgacgcaactggattatcggacgcatgcaccaagaaggctttattaccgcttctgaaaaagatgccgccattgctgaaccaatggggctaaatatctatcaagaaaaacttgatctaaatatgccttatgttgcagagatggtacgctccactttggttgaccgctatggcgaggcggtgatggattcaggttggcgtgttcaaaccacaatcaatagtagctcacaacttgcggccaatgctgccttagtggggggtttacgtgattatgaccgtcgtcatggttggcgaggtgttgaagcagaatcagggtcgcttgaaggtcgtaaaaattttgatcatatttatcctgccaaagttactaaggttcataaccaaagctttgaagctaagcttcaatctggagaaaccgtaaccatcggttggtcaggtatgaattgggcgcgtcgctactatgatgctaaccgtgtcggtggtggctacagtaatgctcatcagatggtcaaggttggtaatattgtgcgaatctctccgatcaatgaagcaaaaacagcttggcgtatggaatctattcccaaagttcaaggtgcattggtctctttagaccctgaaaatggtgctttgcgtgccgttgttggtggttttcattttaatcacagcaaatttaatcgtgctatccaaggctatcgccaaccaggatcgatcattaagccttttatttttgctgcagcacttgagtctggtcaatatacgccagatagcttaatctctgatgctgccattcgtgttggtaggtggcaaccaaaaaatgccgatggacgctacacaggcgatatgacactacgccgtgcacttactttatcacgcaataccccagccattcgcctgctgcgttcagcaggtgttgatgaatctcgccacctaatgaatgccatgggtggacttgagatagaacgcatgccgtctacattggcattggcattgggtgctgctgacgctacacctttacaaatggcaactggttttgctaccatcattaatggtggtcatcgtatccagccttattttatcgaaagaatctataattttgacaatgaaaccatctatcaagccaacccacagcaagcctgtgcactttgctttaatgaaaatctttcggcaactaatgccaaattgcttgaattatttgaagccaataaatcagagatttctacagacacgcctagcgcaccagctggcgataggctacaaccaagaagcgctccacaatatgtcgctgccactcaagcaccccgcgtgctttcccaccaaacggcttatgacatctccaatatgatgcgagaggttattactagcggtacgggtcgcagagctcgtgctttgggtcgtagtgatgttggtggtaagactggtaccactaaccttgccaaggatgcttggtttgcaggctttcatcctactaatgtggctgtggtttgggtgggttttgatacgccatcaactttaggaaatagtgagtacggtggcgtggctgcattaccaatttgggtgaattttatgagccatgaacttcgcaacacgccttcgcaatggatcagtcaagaagatcggtcaaaagccgtcaaagcgacccaacaagttattgatttgaaagattaataaaaaaacaaccctgatgaccattatcagggttgtttttttataattagttttaggctgctagtacgcgcccatgcaagtctgttaggcctttttgcatcactgcttgcaaaacctcagttaattcacggtgatctcgaccttcaggataaatcggctcaaggggtaatacatacgctgtaatccctcgagcatgggcgcgctgattttaaacttagaaccatacgcattttttgccataataagcagctttatcggacagcccaccttctttatccacatatgcaattaccattgggcagaccgcccagttggtatcaatagcagcttttaataatttaccataaattttcttaatctgcttaccatctgtcgttgtcgcctcagggaaaaaaatgaccgatgacccctcactcaaaaactctgcaatctgatcactcaccgaacccacatctcctgagcctcgctgaataaaaagcgtgccacctgcttttgccaagcgtccaaaaattggccatttaccaatttcagccttagacaagaaaaagacaggtgcaacactgcccaccacaggaatatcaagccaagagacatgattactgacccaaagcccgtgcctttgtggaactggctcaatttgactcacagttacaccaaatgaatttgccattttttggcaaaatttttgtccatagggcatcaatcgattgcatggtacatcagagcgatatgcctttgattcataaagcatctgaaaaccatttaataaagtatttgtcactccaaatgctgctttagtacgataatattgattgctaatgaaatttgacataaataaactcaatgcatttctttgcggg

SEQ ID NO: 22 - DNA, 45613 bp, Moraxella catarrhalis
ctttattaaaacgggcttaggtgcgataaagtgacagtctgaccatcatgccgatcaagcacatcggtggcagcttttgcttttagaccaccgtagggggtgatataaagatagcttgcatgggcgagtgctgaccattgacgcttattaagctgcttaagttctatggcattggcatgattgggaggggttttcccaaaaaaaagggcctactttgaaccatcataagttaagccgatacgcacatggtgcttgttatccttataagggtaaaaacccgtttcagcaccttcgatataccaacgattattatcataaaaagcttggggcatgacaaaaataggatctttggcatgataagcggtcgcattataagtcgcattgacgccaagtcttaggctggcatcatgatcaatcggtaagctttgggcgtatgcggtggtcgttagcccacagatcacagctaagctgaaagtttttatgttcatttaaattcattcttgggtaggtatgtatccataatacatcgctttggtcgagtggtcaaacggcacatcagctcatagccaattgtccctgcacacattgccacctcatctatcgtgggcgaatcgccccacagcacaacaggcgtattaatggcaatatcaagcccatcaatatcaatcataaacatatccatggcaactctaccaatgatatcgcataagtggcgattgcctgaagtatcggtcacgctgactttagcacccatcaccactctggggtaaccatcgccatagccaatactgacaacagcaatttgatgtggtttttgtgctgcccacagtgcactataaccgatactgtcgccagctgccaaggtgtgaattgccatcacttgtgccgatagcgtcatggcaggcatgagattgagtgctttggctgattggtcggtgatgggcttagagccgtacaaggcaataccagcacgcacccaatcatgatgctggtgcttaaaattaaaaatccctgctgaattacacaaactggcaagcgtatcaggtgcaaacgatcgaatacacgccaaggcttgatcaaatttgctgatttgttgtgcatttagtgggtgtgatttgtcatctgcacatgcaaaatgacttgtcaaaattagccgatagcctgcatcggccaacgatttggcggccgtgatgatgtgatcgtcattaaatcctaggcggctcatgcccgtattgtattttagccaaatggtatggcaaaattggtcttgcttgggtcgatgagacaatgcccatatgagctgattttcatgatgaatcagacagccaaaatcatggtcaattgccactttccactcatctaagctgaacgcaccttcaatcagtacgatgggttttttgtgattcatgccatcaagtacttgcttgaccgccatggcttcagacaaacacgccacaccaaagccatcggcatggatcaaagcaggaatggttgcatctatgccatgaccgtatgcatctgctttgaccatggcgagtactttggtcgttcggtcaagctggcttttgatgatttgcagattgtgtgtcaaagcattagggtggatggtgatagaggtgctacgcatcgtattcattattcttaaaattattcatcgatatcataatcttcaggcatatcgcctggaattaaatcatcaaatcggacatattcaccaatgaatttgagcggcactttaccacgctcaccttgacggtttttgccgatgataacctccgccaaatgcttgatatcatctttgtcttggtgataataatgatggcgatatacaaataaaatcaagtcagcatcctgctcaatttgccctgattcacggatatctgaaattaatggtcgcttgtttgggcggtcttcaactttgcggttaagctgagatagagcaaccacaggacagttaagctcacgcgccagtgcctttaaactgcgagaaatctcgcccatttcattgactttgttatcgcccataccaggcacacgcatcaattgcatataatcaatcaaaacaaatcccaaaccgtcagggtggtttttggcaatcctacggcaagtggctctgatttcagaagggctaagatctgaacggtcatcgatgtataaatgcttgtcttgaagcaaagtgacgccattcataaaacgcccccattcatcttcgttcatattcgccgacattagacgcttcatatcaatactgccccatgctgccaacatacgcatagcaatcgattcagcaggcatctccatcgaaaaaatggcaactgctttattagacatcagtgccgattgtgcaaaatttagtgccaaagccgtcttacccatcgctgggcgagctgccaaaatgattaggttgccattttgaaaaccaagtgttttattattaagctcaataaaccctgtatcaagaccaatcaggccattagggcgtaagcgaatgtcgttaagctgagtgacgacatttgccatgacatcatcgatacgctgtgggcctgttttactactacctttagcaaagctctccccaatacgaaaaatatccgattcaatcgtatctaaaatctctgttatggtttgcttttttgggtgatatgccaaatttagcatatgattggcggacgaaatcagctgacgatataccgacatttctcgtactttttcggcataattgatgagattaaaataatttgccgtgctttgattgatggtaatgagatagtcttcaccgcctgctgataccagctgaccaatgcgacttagataatcatgcaccatgatgctatcgtatggctcattgacacgcgccaaatgactgatggcatcaaagatttttttgtgtctttcgccataaaaatcattggcgttgatgatattttctatgtcttcaaatgaatcattaatactcatcaagcttgccaaaagtgaacgctccatctcaatgctgtggggcggctgaagcgtaaggaggctgtcttttttatcgttcgtgttggtcatgtcagtatttggcttatgcaaaaggtcgtacaaataggatttatgtttggtaatcgctataaataatgataaaatccggctggaaaatatgccataaaaaaacttaaattgtaccataaaaaccttgtgagaatcttcaaaaatgcctaattttgataaaaatatcatcaataaatcgcttgacaatcaggcgaattatccgctcaatcacacacctactaagccaatgctcatcaccacaggtgagcctgctggcattggtatggatattgtgttggatgtgatcgatgctggcgatttatcagaaggtatttggctgatcactgccgataaatcggcatttattgcacgagccaaagtacttatcaaggtaggcaagcttagcaaagtacctgatttttatgtgattgatgtgcctgacaaaatagatcacatcacagaaaattggctggatagtcagttaactgataatttaaaaaatcaatcaaaaaatcatcctttggtgattgttttaaatataatttgctgtgatgaagttatcgcaggtcaattaaacaccgcgaacgctgccatggtagagcggcaactacatttggcacatgtgttagcaaaaatgcatcaaatccgtgccatcatcaccgctcctatacaaaaatctgtgatgattcaagcaggcatttgccttgataatggcgatatatttagcggtcataccgaatattttatgcacaaatcaaactgtcataaagtcgtgatgatgcttgctaatcgtgtgatgaaagtggcactagtaacaacacatttgccactcaaagatatctttgatgctattaccgccaatgaaatccaagaaaccatcaggattactcatcaaggattggtgacacaatttggtattttatcacccaaaattttggtttgtggtcttaatccacatgcaggcgaagacgggcatttgggtgatgaagaaatttgcattatcaaccctgccttaaaagtattgatggctgagggtattaatatttcttatgccatgcctgctgatacactatttacaccgcagcacttggcggactgtgatgctgtgattgctatgtatcacgatcaaggtcttgcaccacttaagtcgcatggttttggtgatacagtcaatatcactttgggcttaccttatgtgcgtacatcggtagatcatggcacggcgttagatttggcagggacaggcagagcatctagtagcagcctaaaacaagcgattttttatgccaataaaatgtcaatatctgactttgatttggcataaacttgcaaaattcatcatgaaaattttcacgctcatcatcgaaacatgatatgatgatcacaatttttattcagcgttcaatcattaattatgcacattatcccaaagtccccgcaacaagccaagcatgcacctcgtaagcgttttggtcaaaattttttacacgatactcatatcatctctcaggttgtgaccgctattcggttagacaggcaggataatttattagagattgggccaggtcttggggcattaaccgagcctttgcttgctgaggttgatggcatgacggtgattgaacttgaccgagatttagcatctcagctgaagattaatattggtgccaatagtcattctgattttacgatcatcaatgataatgcgatgcatgtcaattatcgtgcgttggcggagcagattggtaaaggtgtttttcgggtggtgggcaatttgccttataatatttctacaccgattttatttcgcttgcttgaatttagtgatgtgatcaaagatatgcactttatgctccaaaaagaagtggttgatcgcatcacagctgagcctaattcaaaagaatatggcagattatcggtgattatgcaatattattgtcaatcggattatttactcactgtccccaaaggggcatttaatccaccacccaaagttaccagtgcagtttttagactaacgccttataaaaccaagcccattacagcaatggatgagtcggtgtttgctttggtggttcgtgaaagctttaatcatcggcgtaagactttaagagcaatttttaaggcaaatgggctattaccgactttagatgaatcagattttgaaaaaatcggcatcaatccaagtgcacgccctgagacattgtgtgtgcatgagtttgttttacttgctgatttggtcgtcaaaaaccgtcagccatcaccttaatcatatcattgctgagtatgaatacagaacaaaaacactaccgccatcaatatgtcatcggcgacttacaaggctgctttggtgcatttaatgagctattaagtgcgttaaattttgatgaaacccaagataaactttggcttgcaggtgatattgtagcacgaggtgaagattcgcttgccacacttagggaggcaaaacgcttatcagacattgacgcactgagcacagtgcttggcaatcacgatattaccttaatcgccacttggcggggtgtcttaacccccaaagcaaaagataagacgctaccgatttttgaagcacctgactgtgatgagctgcttaactggcttcgacagcagccacttttggtatttccagatgacaggaccgtactgacacatgcaggcattccgccaaattggtccatcactgaggcggcaggatacgccaaagagcttgaaaagcagctgtcgggcaacctaaaacagttagatcgtttattaccaaacctttatcgtaaaaaaagcgaagtgtggtcagatgacttaaatggccaccaaagaatgtgtgccatcgccaactactttactcggatgcgtctttgcacccaatcagggcgattggagttttcttttaaaaaatcactaaaagatgatatgccaatggattttcgcccttggttttcttggtttgcggtacgagaaagacgcattttatttggacattgggcagctttaaacgctgaggtggcgaccaaatttgtgcgtgcacttgatggcggttgtgtatggggtggtaagcttgtggcttatcggctgagcgatggggcgtgatatccgttggcgatcactgctcatgatgatatgatggctgccaatgacccaaaatttcatttataatttgatgctggatttggattttatatctaaatgctttaaattatttttaagttaagcaaaggatatttatggcaatcttaaccatgaaagcgttggacttggcaggcaagcgtgtgttaattcgtgaggacttgaatgtccccattaaagatggtgtcatcgccagcgatgtgcgactacaagccgctttaccaaccctaaaagatgccttagcaaaaggtgctgcggtcttagtcgcatcacatttgggccggccaaccgagggtgagcctgaccaaaaatattcgctggcacctgttgctgactatttgtcaaagcatttagatgcacccgtacgctttgaggccgagtatctagatggcatagaagtggcagtaggcgaattggttttacttgaaaatgtacgctttaatgttggcgagaagaaaaattctgatgaactatcaaatgcttacgccaatctttgtgatatttttgtgatggatgcttttggtgctgcacaccgtgcccaagcatcaaccgaaggcgtcattcgtgctgctattgagcaaggcaagcaggtttgttcgggtaatttattaaccgaggagttaaacgctctgtctcgagcgcttgataatcctgccgcaccagtgcttgcaattgttgccggctccaaagtctcaaccaagcttgatgtactgacaagccttgctcaaaaatgtgacagtatcgtcgttggcggtgtatcgccaatacttttttggctgcaacaggcgtgaatgtgggtgcatcattgtatgagcctgatttgattgataccgctaaacaaatcatgaagaaaaccaacattttgttgccatctgaagtggtggtggctgacaaaaacgagatcgattttgatgactttttaggttcgcttgagaaggcagcagcaacggtcaagcctatcaatgaacttaatgatacggacatgattttggatatctcaaaagcaagtgccgatgagattgccaagcatattcataaggccgctaccattttatggaatgggcctgtgggcgtctttgaggttgataaatttggcacaggcacacaagtgctagcaatggctgtcaaagactcatcaggatttagcattgcaggtggtggcgatacattggcagcgattaataaataccaagtagcagatgatgtcagttatctatccacaggtggtggtgcttttttagagtttgtagagggcataaccctacctgcaatcgcagcacttaagttagcatctgattaattattaatttaatatatttaaacttaaggcattgtttcaagctctatatgttattgttgtattattaaatttagggcttgtcaaatgcaagttggctgactcaactagtcatatttgacatctttcgtcatttcaaaacacacaagagagaataacacatgaaaaaaatcctacctgccgctgtttttgctattttattggctgcctgcagtcaacaaactcaagattcagccagtcaagctgcatcatcggtcgctgaggataccaaagcaaatgctactgttgtcgcccaggaagcagaagcggcacacaggcgacaggtaacgctgttgagaatgctgcagaaacagcttctaatgctgccaaaaaccttggtgccgccgttaacgaagtgactgccaatgagcaatctgccgaagccaaagcacctgaagaccaacagtattaatttgttcgacacatacttaaagttatcctttgatatcggctttttgagtataattaacttggtgtataatctttgcttatggtataattcaccgatattttttgattattttaggagagtatgatggcattggtttcattacgccaattattagaccacgcaggcgagcatagctatggtttgccagcgtttaatgtcaataacctagagcaaatgcgtgccatcatgatggctgccgataagacagactctcctgtcattgtacaagcttcggcaggtgcacgcaaatatgctggtgcaccatttttgcgtcatttgattttatcggcgattgaagagtggccccatattcctgtggttatgcatcaggaccatggtactagccccgcagtctgtcagcgttccattcagttgggatttagttccgtcatgatggatggatcattgcgtgaagatggcaagactccagctgattatgagtacaatgttgccgtcacaagagaagttgttaagatggcacatgcttgtggtgtgtctgttgaaggtgagattggtgtgcttggcagtcttgaaactggtatggcaggcgaggaagatggtgtgggcgctgaaggcgtcttggatcacagtcaattactaacttctgtagaagaagcacgccaatttgttgccgataccaatgtggatgcacttgccattgcggtcggtacttctcatggtgcttacaaattcactcgcccaccaacaggcgatattttggcgattgaccgtatcaaagaaattcacgaagctttgccaaacactcatatcgttatgcatggttcaagctcagtacctcaagagtggctaaaaattatcaacgaaaacggtggtaatattggcgaaacttatggcgttcctgttgagcaattggttgaggcgatcaagcacggtgtgcgtaaaattaatatcgataccgacttacgcttggcaagtacaggtgcggttcgtaaatttttgaacgaccatccagcagagtttgatccacgcaaatatttgacagcttcaatgaaggcaatggaggagatttgtgttgctcgctacgaagcttttggtgctgcaggtaacgcaagcaagattcgtccaatcagcttagaaaaaatggttgattattatcaatgatcggtatgatctcaggacaggtgcagtatcttaatgcacctattgcttgtattttgacctcaaatggcgtgggttatgaaattgagttgcccatacctagcttttgtcagctgaccattggcactcagaccgctgtctatgtacatcatcatgtccgagaagatgccataaatttgtttggttttatggatcgtcatgatcgtgatatttttagaaagctgatcaaaattaacggcgtaggtgctaaaatggcgttagcaatgctttcaaccctaagcgttgccgagattaaacacgctattgaaacagattatgatgcagctttggtgcgtgtaccgggcattggcaaaaaaactgctcagcgtattttgcttgatttaaagggtaagctcaatgagtttggcgaaatgcacccaatgacagcagagggtttatttaatcaacctgccgataattccatgttaatcgttgctgaggttgaaagtgctttgatgaatttgggttataaggaaaaagaagcacaagtggccataaaaaacgcccaatctgatgctaaaaataatacttctgatcttctaaaagcagcactgcgtcagctttcggggttctaattgcgatatgattaataaaaaccagccaaagcatgtggctggtttttattaatcattaatggatagcatggataataacgcttgcatactggcggatcgagtcaaattgggattggtgactaagcctaaatgtctttgaagttcgatattttctgccatatcaattttaatcaaatcttggttaatcagcgtttcaggcaatactgaccagcccaagccgaccgagacgagcatacgaatggactcgagcggattggtgctcatcgttgcataaggacgcaaattatgcttggcaaactcagctaaggtaatttggctggtgaatgtattggcagctggtaaaattgctggatagtgtgccaactgaagtaagctgaccttggatttttgagccaatggactgagtgtacctgttacaaaatataatgggtcgctccataaggtatgataattaaggcgtctgtcaaaagtcggtggcagagtcaaaaaagccaaagaaatttcaccttcaagtactgccttatgagcttcttcagaatccacaaaccgaacttcaagctgaaccgctggataagtctgaatgaatcgtttgagtacgtgcgcaagatgatgcagtccaatatgatgactggtgccaatgactaatcgaccagaagcaacttctttggcatgttgcaagcttgctttgcaggcttcatagtcatccagccaccgccgtacaaagggtagtaaatcatatgcagcagccgttgggataatgctacgaccaaccgtatcaaacaacgccgtcccaaattcatcttcaagattcttaatacgcttacttacagcaggttgcgtaatataaagcttttcggcagcactagagatgctgcctgtctgcataactgcaacaaaagtggcaagatttgtggtattcatcgctcaacccaatatatcaataaatgtcagcatattgctgtattaatcatagcttaatatattccaaaaagttttgcaataaaaattttagggaatgattattattacggttagtttaatggccaaacttttaattccaaaaagttttcaaatttataaaaattataaattattgttattctaaaagtatgctataatggcaaaattacccagtccatgacagtgttggagaataaaatggcaggcaaaaccttatacgacaaactttgggatgaccatttggtcagacagcgtgatgatggttcatcgctcatctacattgaccgtcagcttttacatgaagtgacctcgcctcaggcctttgaaggtttggcactaaacggtcgcacgccttggcggttgtctgccaatatcgcaacccctgaccataatgtacccacctcacttatggagcgtaagcagggcatggcaggaatagccgatgacacatctcgcattcaagtcaaaacccttgatgataattgtaaatcttttaatgtcatgcagtttggcatcaatgacattcgccaaggcatcgtgcatgtggtcgggccagagcagggtttgactttgcctggtatgaccgtggtgtgcggtgatagtcatactgccacgcatggggcattgggctgtttggctcatggcattggtacatcagaggttgaacatgtgcttgcgacccaatgtttggttgccaaaaaaatgaaaaacatgctggtgcgtgtggatggcaaattgggcaaaggtgttaccccaaaagatgtcgtgcttgccatcatcgctaaaattggcacggcaggggggacaggctatgccatagaatttggcggacaggtgttttgtgatatgtccattgaggggcgtatgactgtgtgtaatatggcaatagagggcggtgctagggttggtcttgtggcggtggatgataagaccattgactatgtcaaagaccgaccttatgccccaacaggcgatgattgggagcgtgcggtaacctattggaacacactacattctgatgatgatgcccattttgatgcggtagttgtgctaaacggtgatgagattgagccacaagtgtcttggggaacctcgcctgagatggtgattgcagtttcgcaaaatgtgccaacgctggatatggcacgagacgatgtgcagcgtaatgactggatgcgagcttatcaatacatgggcttgacagcaggacagcccttgtccgatattgtgcttgaccgtgtgtttatcggctcttgcaccaactcacgcatcgaggacattcgtgcagcagcagaagttgttaagggtcacaaagtcgctccaagcatcaagcaagcgatggttgtggcaggctcaggactggtcaaagcacaagccgaacaagaagggctggataaaatctttatggatgcaggctttgaatggcgtgaaccgggctgttctatgtgccttgccatgaatgctgataaactacaagctggcgagcattgtgccagtacctccaaccgcaactttgaaggtcgtcaaggcaatggtggacgcacgcatttggtatctcctatcatggcagcagcagcggcaattgcagggcattttgtggatgtgcggacattttagcactcaaaatcatttagagcagctaatcactggttaaaaagtcgtttggcatcaaagagcgttggccagctgattttaatggtctttcaatcatcagctcatcggcgcatctgtcatgtggattaattgattaaaaataaccattttttggagacaatcatggaaaaatacaccaccgaacagggcatcgttgccccacttgaccgctcaaatgtggataccgatttgattatccccaagcagtttttaaaatccatcaaacgcacaggctttggcgataatttatttgatgaactgcgttatttggacgaaggatttttggggcaagacattaataagcgtcccaaaaaccctgattttgtgttaaaccaagcccgctatgctggggcaagcattttactggctcgcaaaaactttggctgtgggtctagccgtgaacacgctccgtgggcattggaagaatatggctttcgcaccgtgattgccccaagttttgccgatattttttataataactgttttaaaaatggcatgttacctgttgtgctaagcgatggcgatgttgatgacttatttaacgaatgttttgccaatgtcggttatcagctgacggtagatttacaaaatcaaaaagtcatcagcccaagcggtaaagaatatgcttttgacgtggacgaatttcgtaagcattgtttgttaaatggtttggacgatattggcttgactttgcaacacgccgatgacattaaagcttttgaagaaaaatccaaagcggacagaccgtgggtgtttaaagaattgggggcttaatattatgactaaaagtgcagaaatttcagagtgtggtaaatatagataccaattaaaaagacaatggaataacggtaataattttgttctttttattggtttaaatccttccatagccgatgcagaaatagacgaccctacattaacgagatgtattggctttgccaagcgtgaaaattttgatggtttaattatggtgaatttatttgcttatcgtgctactgaccccaatcaattagttggcgaaaaagattatttggtaggttctttaactgacgagcgaattaaagacgtattgacggaagttaatgcagtggtggtttgttggggtaatgacggttcttatttagggcgtgataaagaagtgcttgaactcttaaaaaaccatgttaaagataagccaatttattgtcttgataaaaataaatcaggacagccaaaacacccattatatgccagtggtgaaaaagattggattgaatatatttaagattttattcaacaaggaaatatcatgaccaaaaaaatcgcaattctaaacggcgatggtattgggcctgaaattgttgcccaagctgtcaaagtgttagataaactcattgagcaagggcttgatgtgtcctataaatacgccaaactgggcggtgaagcctatgacacttatggcttgccatatccaagccaaacccaagaaatcgtacaaaaagctgatgcggtgttattgggggcggttggttcgcctaagtacgatgaccttgaccgcccattgcgtcctgagcgtggactgcttgccattcgcaaggatttaaatttatttgccaatttacgccctgcaattttgtataaagaactggcggatgcttctacattaaaacctgaggttgtggcagggcttgatatcttaattgtcagagaattgacaggggacatttattttggtgagccacggggcattgtaacccttgacaatggcgagcgtgagggctttaataccatgcgttatggcgaaagtgagattcgccgcattgccaaagtgtcctttgaggctgcccaaaaacgccgtggcaaactgtgcagtgtggataaagccaatgtgttagaaaccaccgaactttggcggcagatttttaccgaagttggcaaagactatccagaggttgagcttagtcatatgtatgtggataatgctgccatgcaattggtcaaaaatcccaagcagtttgatgtgattgccacaggcaatatctttggcgatattttgtccgaccaagcgtctatgctcacaggctctattggcatgttgccatcagcaagcctaaacgagacaggcaaaggtttgtacgagccgtctcatggctctgcccctgacattgcagggcaagataaggcaaatccactggcgaccatattatcgcttgccatgttggtcagatatagcctaaatgatgaacagcgagcggtacagattgagcgggcggtacaaaaagtgttagagcaaggctatcgtacagcggatatttatgaagatggcacgacgcttgtgtcttgtgatgagatgggtgaggcggttcttaatgcactgtgattttgggtaagaaaataagccattgagtgacaatcatgccttacattatactggcgacttattttaagttgccaatggtagcggctgatcatacggcagttgcactgatcagtgtctggacaaattttttgggcaaacggtgggggcgaatcgtttttttgtcattgatgacacaagctaaagtgattgtcgctgttgtggcaggcttgttttgattggggcgataaatactttgatgtatcatcaagctggctggtctaatacgcacctcatcaaccgttactgccagctcatcatcaaccagcaaaggcgtgtgatatgtaatgtctgcatgacttaccacaaaatgcactgctttgcgtgattctgtattggcgtcgtcatccaagcttagaaaataaccatcatagccaagtgtcgtcagccaatcacgccgacaattttcaaaaaataccaaatgattggcatgatagacgataccgccagcatccgtatgattgatatacaccttataagttttttgaaaatttaccataactttgccataattatccaaacaatacgattgggtcaagtaaccaatcccccaatcattgtacactgtttaataaacgcttaccagtttgtgtctggtatttcgttttaggatgtataaagttcacaaaatctcatcaaaaattgttacaataccaaatcatcaaaaaatacacatttaaagagaaaataatgacgacatttgtcagttttaatattaatgggctgcgtgcaagaccgcatcaacttgaggcaatcagagatattttgggtgcagatattattggcttacaagaaaccaaagtacatgatgcactttttccagtaaacatggtacaagatttgggctatcatgtcgaattttttggtcaaaagtcgcattacggtgtagcattggcgtctaagattgcaccaacatttgtccaaaagggctttccttttgggcatgatgacgcacaacgccgcttgattcacgcacgctatgattttgatgggcggagtatcgatgtgttaaacggatattttccccaaggtgaaaaccgcagtcatgaaatcaaattccctatgaagcgtgaattttatgccgatctcaatcgctatattgatgaacttcaggctgatggtcgtgagctgattatcatgggggatatgaatatctcaccagaggatattgatgtgggcatcggtgcagccaatgccaagcgatggcttgccaaagggacttgctcatttttacccgaagagcgtgcgtggtatcagatgctgatgtctacaggtttgacggatacttatcgcttgttttatccaaaaagtcatgatgagtttagctggtttgattatcgctcacgaggatttgaggatacgcctaagcgtgggctacgcattgaccatattttatgtacagatactctaaaaaatgactgtgtggcagcaggcattagctatgatatccgtgcaatggataagccatcagatcacgcacccatttgggcaaaatttaatctataaaatatgcgtatcaaggacagtatcggtctgacacatgattggctggataaaactgatgaacttaaggctattaacagaaaacacatctacaccaaatgatttaatcatgcaaatatctccttaatctgaactagcgtctaaacttagcgaagcttaacttttgaagaactttaatcatcataacaagttttttggtacttgccaaatatttatttatcgtgattggtactaaaaatttggcaaaatcttgatgattgattttgaataatctgttacaatacttggtatatttttattgaatttttatcaaattcacacattaaaaaattgcatattgggtatattatgagttcgcaaaatcaaccacagcgtaacgaagccgccatttcggaaaatgagctaatcgcacagcgtcgtacaaaactggacgccttacaacaaaaagccaagcaagcaggcaaaagtgcttatcctaatacctttaagcccaagaactattgtggtgatttgcaagcacagtttgatggcgttgataaagctaccattgaaagtggggataaggtatatgctaaggttgcaggtcgtgtgatgctcaatcgtggctcgttcattgtgatccaagacatgaccgaccgcattcagttatatgtggatcgtaaaggcttaccaagtgagacgcttgagctgattaagtcattggatttgggtgatatcgtggcggcaagtggctatattgggcgttcaggcaagggagacttgtatgtgcatcttgaagcatttgagttattgaccaaatctttacgcccattgcctgataaatttcatggcttgactgatacagaagtcaaatatcgcaagcgttatttggatttgatggtcaatgaagagacacgaaacacatttgccatccgtgccaaagtagtggcgggtatccgtgcatttttgacccaagaacgctttatggaagtagaaacaccgatgatgcatgtgattccaggtggtgcgtctgcacgcccttttgtgacgcatcataatgcattggatatgcagctttatttgcgtattgcacctgaactgtatcttaagcgattggttgttggtggctttgatcgtgtgtttgaaattaaccgtaacttccgtaatgaaggggtttcaacacgccacaaccctgaatttacgatgattgagttttatcaagcttatgctgattataaggatttgatggccttgactgagcgtatgcttgagacattggcgatggatattttgggatcgactgatgtatcgtatcaaggtgaagtgtttagctttaaaggtccttttaagaaaattacgatgtttgatgccatcttagaatacaattctgattttagtgccgatgatatcaatgaccgtgaatttttggcaaaatttgtcaaagatgaattaaaacaggaggttaaaccaagttttggtctggggaaattacaaaccatcgtttttgaagaaacggtagagaccaagttgcgtcagccgacttttatcactgaatatcctgccgaaacttctcccttggcacgccgaaatgacaccaatccacatgtaactgatcgctttgagatgtttattggtggtcgtgagcttgccaatggttttagcgagcttaacgatccaattgatcaagctgagcgattccgtgcccaagtggctgaaaaagatgctggtgatgatgaagccatgcattatgatgccgattttattgaggcacttgaatatggcttaccaccaacagcaggcgagggcattggcattgaccgtcttgtgatgctgtttgctgacgccgccagtatccgtgatgtgattttatttccacacatgcgtcataaataagcctctttgccctatggataagcaatatcaggtcttagcccgaaaatatcgacccaaaaacttttctgaacttttgggtcaatcacatgtcgcccaagcactgtcaaatgccattgatacaggcagattgcaccatgcgtatctgttcactggaactcgtggcgtgggtaaaacgaccatcgcacgcattcttgctaagtgcttaaactgtgaaacaggcatgacaagtcagccttgcggtgtatgcgatacttgtattagcattgatcaagggcgatttttggatctgattgagattgatgcagcttctcgtaccaaagttgaagataccagagagctgcttgaaaatgtcccttatccacctgtacaaggtcgttataaagtctatttgattgatgaagtgcatatgctatctacgcattcttttaatgcactgctgaagactttagaagagccaccagactatgtcaaatttgtatttgcaactaccgacccccaaaaacttcccattacgatcatttcacgctgcctgcaatttgttctgcgtccactaccgcaggcttgtttgttcgatcacttagccaaagtattagatgcagaaaaaatcccttttacagaaaatgccttatggcaattggcaagcactgcaaaaggttcggtgcgtgacgcactgtcgctgaccgatcaagcgattgcctttggtggtggtcagattcaaacagatacggtcttatcgatgcttggattggtaaatcgtaccgatgtgcttgagattattgagacaatttaccacgatgatcgaatggcaatcagccaacttatcaccaatatgcgtgataaaatggtcgatgctactgcaatctttgacgaactcattgactgcattcatcaaatggcactcatgcaggtgttgcctgatatccctttggatatgaatgatgaacaagcacatcaaattaaacgcttatcatctgccatcagctcggatatcttgcaactgtattatgaaattttaatcaaaagccgagacggcattcgcttggcaagtacgccaatgcaggctttagagatgggtatcttaaggttgttggcatttcgaccgctggcagaaggacaggtgactgttttaaatgatacgccagcaaagcagccagaggatgctgacaaccacaataacatgcctgatgatatcgttgacggtctaaaagatcaagcctgtgctgctggtgaaattaatgcgttatctaccgatagtcattttgatagcgacaagcaagatgatttgaatgatttggcatcacagataggcactgagttaatcttagatcaattagacaatgacaatgtaaatacaaaagatggtcaagatactaaccaatttgctcataccgatcaagcacaatctaccaatatagccgtcaatttgaccgtatctgaggaaaatttttgggtaaaacagccccagtctgatccacctgagcagttgcaaactgatgaagatttgccaagtgatcatgatacactcacccaaatggccaccgaaccatcacttgcggttatgtcggatagtagtgataccgatgagcttacagctgattttactgaagatttgcagtcagtcccagcagttacagtagcggcattggtcaaggttgatagtaagaaaaaagcatcacatcaagcagatctgacagctcatcagccagcttcacacaatttggatcaacagcccatcagtcattttgaccatattaatccgtcaaagcctttggcacacctgcccagtcaaccgatgaccaaagcccaaatgcttgagcagctaaagcccacaccaattgagcttgaggggggctggacaagtgaaaaatgggactattgggtacatttggcgcgtgaagaagggcattttgcacctgatgagcttgccttgatgagtacgagtgtgatggcaggcgatatcgctggcgaaagccgtttattggttgccgagattaactctcaagttcaatccagttttgagaatttgcacgccaaatttttagagcattacccacaaattaaactgtctttagagcctgtactggtggattgtgcgttagaagtgccaaaatctcgcttatctgatcgtcatagtcaagtgcagatgcaggctcaacatcagctggttgatagcccagtttttcaaacactttggcaaggtggttttatcatcgatgatggcacttcagtgctcaatcaatctaagttgcttattgactaaaattttggtgaataaagcacatttttccataactgatgatggcatatatcccaaaaacttaaaaatattaagcaaatattgcccaatcattgggttgttaaagttacgcaaaagctgttaaggttatgcaaaaaatattacaatgagatacattttttctgaacaatctcttgctaacaaattaaaattcctttatagttggtaaccataatttttgagagtcttattaaattatctttaatttaaaggatttggcattgtatgtccaacaccaagcaaatcataacttaataatgactttttgacgataaaattatgctaaaaatgactgattagtcattattttaataacataatattaaaatttattaaaattctattatgatttgctttttattaaattcaaatcatttaaattaattaaataaaactaaataatttgaggtaaatatgttggataatttacgaggtatggcggttttttcaagcgtcgttcgtcacggttcatttagtggtgcagccaaagagcttggcattacaacgagtgctgtaagtcagcaaattcgctctttggaaaatgatttgggcgtctctttgctacatcgctcaacccgtaagctaagtctaaccgaagctggcgaaagtctgtattcatcagccactcaaatggtaaaagcagccgaacaagggcgtgatagtgttattcagctaaaagatgagctttcaggcagtctgcgtattgcgaccaccccagagcttgctaaggcttatttactgcctgccttatctgattggttggttgagcatgataatttatcattgaatatcatctcacgagacaatttggatatgattgaagatcgtgttgatgtggctttattattgagtgaacaagctcaaggcatcgccctaaagactgtcgagcaaatgctgattgcttcaccagaatatatcaaaaatcacggcgatgtagaaaatgttaaggcattggcaacgcatacgatgattatttgtggcgaaaaaccaagcgaaagcatcgagtttaaagatgcaaacggtaagcagtctgtacgagtaagctcaagaatcatcaccaataatcatgccatcgcattaaacttggctgccgagggctatggtattgccaagaccaatgctgttgatgctaaggcgttgcttgagtcaggtaaagttgttaagatcctaccaaatcacagtttgcccatactgactttgagtgctgtcaccatctcaaaagaacaaacaacggtcaaggcacaaaagtgcattgaagtacttgaagcgcactttaagaattaatttaattaagtttttaaaccctgcattatgcagggttttttatggatgaaatatgataaaaaggataaaataaatatcatgcttccacccattttaaatattttgacacggccaaacttaatagaatgcgtttaataagtatcagcagatttttaaatatgcagcagccaatctttggcggctttgaccaaaaagttttcaaagcttttcatcgctggcctttggctacgctggcggtgcttgtacagtaaaaattcatacccaatctgtggctcatgaatcggaatcatgaccaaaccttgctcgtctacccaagttttggcatagccaagtgtcatggtaatccccaagccttctttaaccatgcccaaagccgttgataaaaagttaacttggtaatcactgcgaaataggcgtgtgcagatatccaaagtcaacttttcacgaatatgatcggcaaacggtgcttgcacggtaatcaaatcaccttcgctcaaatcttgccatgtcaaaacctctgaatctgccagggggtgatctgcacgcaccaccaacccaaaagacgaccgaaacagtttggtttgtatcagatcattactatgcaaaagatcaggtccaagcccaatatccgcatctagcatttgcacatggcttgccacctcttcaattgagcaatcaattaaagtaacttgaatatcaggatacgcttctttaaacaagcgaatcaaccttggtatcgagaatgctgacagttgctggggtgttgcaatacgcactttaccttgatgaaagtcttgtaaatcattgacctcatgacgcataagttgcatatcgttaagcaccttattggcatggggcaaaaccgttcaccagattcagtcaaatgaatttgccgtgttgtacggtcaaacaatcgagtatccagctgtttttttccatctctttaatcaagccgctcagcgatgattgtgtcaaatgcaattcggttgcagctttactaaaactgtgatgtcgtgcgatgctggcaaatgctctaagctggcgaaaagtaatattcataggagtatccaataagtataataaaaattccatttgtacgctgtattgacttattttatgataagtatcagcatattagcaagcatcatttatcaaaaatatcaccagccaaacacggagtattttatggcagatttatttgaaaacccaatgggattgtgcggttttgaatttgtggaatttgcaagtccaaccccaaatttacttgagccattatttgaaaaaatgggttttagcttggttgccaaacatcgctcaaaagatgtcttattatatcgccaagggggaattaattttatggtcaatcgtgagccaaattcagaagcaatgtattttgctcaagaacatggaccatctgcgtgcggtatggcgtttcgtgtgcgtgatgcacagtatgcttatcatcgagccattgagctgggtgctaagcctgttgagataccaacttcggtgatggagcttcgcttgcctgccattcgtggtattggtggtgcaccactgtatttaattgaccgatttgatgaaggcaaatcaatttatgacattgattttgagttcattgatggggttgatattaatcctgtgggttatggttttaaggtcattgaccatttaacgcataatgtttatcttggacgcatggattattgggcagagttttatgaaaaactgtttaatttccaagaaatacgctattttgatattaaaggtgaatatacagggctgacaggtcgtgctatgatagcacccgatgggctgattcgcattcctttaaatgaagaatctaaacaaggtggcggtcagattgaagaatatttgatggcatttggcggtgagggcattcagcatattgcactgttaaccgataatttgaccgatgcgattgattagttaaaagcagcaggcgtacctttgatgacagcacccaatgatacttattatgagatgctagatgaacgcttacccaatcatggtgagcatgtcgattctctgaaaactcgaggtatcttacttgatgggacaacacaaaacagccacccaagattattgttacaaattttttcagaaacagcacttgggcccgtattttttgagtttattcagcgtaaaggggattatcgagaaggatttggtgaaggtaattttaaagcattatttgaatcacttgaacgagaccaaattcgccgtggtgctttaaaaatttaacgaaatgaatgggtgtaccgacctataaaaaatcttgtctttattttttaaatgtcttaaaaataggatatgatacatggttggcatatcctattttatcatttgaagcagaggtataagtttaatacaaaaagatcaactgattatcgcttgtatcattttttgatttgatgatacttgaccatgattgttatttttaaatacaagtgatggtaacaaagtttttaaaatgataccattgatggaacaagcacagatatgggtattttatactgtattgtgtgatttttagggattatttatgaattcagatacattattaaccatgcgacccatcaaagcggttgctattgcaggtgttctggttgcactacttggtctgacgatgattgcttggagctgggtaccgcatttgtctttattggttgtgattgcagcactgttattttttggtttattaaataaactcaaatttgagcaaatgcaagcatgcatgattggcagtgtgggatcggcaatgggtgcgatttatttattttctttcatcggtcttttggtttctgctttgatgatgtcaggggcaatcccaacattgatttattatggatttgagatattatcagccaaggtattttatctgtcggcatttattttatcatcggttgtgggcatcgccttaggcagtggatttaccacttgtgcaaccgtgggcgttgcatttttgggtatggcaaccgcttttggagcaaatcctgccatcgtggctggtgctgtcatctctggtgcgttatttggtgataagatgtcacctttatcagatacaacgagtatcgccgcctcacttgttggcgttgatttattcgaccacattaaaaatatgatgtatactaccgtgcctgcttgggtcatcacggccataattttttggtatttatcagccaccaataccatcagcgaccttgcaggcattgccatactcaaagagcaactttttagcagtggcttagtgcatggtttttcattaataccttttgctgttcttgtcattttggccattttacgagtcaatgctatctataccattattgcaaccatcataacagcactgatgattacctacacacattcaagcccaagtttgaccgatttgggtggatggttttttgctggatatacgccagcagaagagctggcattgggtgatgtggcaaaaatggtatcacggggcggcttacaaagtatgttttttagtcaactgttggttattttggcattgtctttgggtgggcttttgcaaggattgggtatcttgccagcattattagatggcatgcgtcatttattaacccatgccagtcgtggcgtggcagccgcagcatttacctcacttggcattaatgttttggtgggtgaacaatatctgagtttattattatcaggcaatgcctttttaccagaatatcagcgattgggtttgcatccaattaatctatcacgcaccattgaagatgcaggcacggtgattaatcctttagtgccatggggtgtctatggtgggtttttggctgggacttttgggatgccagtgattgagtatgtgccgtatgcgtttttttgttattggtgctttttattgacactgttttttgggataacaggattgaccattacacgcttatcacccaagttgacatagtgccaatagggcgtttgtatgcttgataagtcttactcttgagagcttaaaatgtgtgatatgttgataaaatggctatgattggtgtatcagatgaatgaaaattgttacacaagaaaaactttcatcatttttatgataaaatacaaagtatctgaaaaaggggataattcatgaaattcatcaagcaaaatagccatcatttggcaatgttacttgcgatgaccactggtgctcatcaagcacacgcattttcggttgataacagtcagcagcgtataacagtacagcccacttatgtgcaacctgctcaggtaatcacctctcaatctgtgtatgttgaaccgacagcccaagtaaccacaacgacaaatgtgagcgtgcaggcagtaccacaagcaccccaagagcatgtggtgtcacaagaaggctatgcacaaacccaactgaatattcaaccacaagtcatctcaagcaccaaaacccaaacaaccgcttacaccaccacctcaaacgcccaaacagccatcttaaatgaccaaaacagctatacaaatagtttttatgcgttgcccatcagtacacgatcggcagcggttttggtctatgatttacaagatggcaagctcatttatggtaagaatgcagatgttcaacgctcaatagcttctatcagtaaagtcatgaccgccatggtcattttggatgctgagcttgatatgcgtgaagaaattactttgattgcctctgacttgattggtgcaaaacaagcaagcacacgcctaaaagctggtgaccgcatgacacgatctgagtttactttgatgatgctcatgcgttctgaaaaccctgctgccaaagcattggcacgcacttaccccggtggatatgatgcttttattgctgcaatgaaccaaaaggcgtatgatttgggcatgtatcaaacgaaatttagtgattcttcaggtttagatccacgcaatatgtcatcagccaatgatttattaatcatgatgaaagcggtcaatagtagtccacgctatcacagtatccgtaatttttccacagcaccacattatgatttttatatcgccaattatggcagtggcgaccgtatctataaaggcaataataccaatcgcctagtacgagaaggtgcttacccaattggtgtccaaaaaacaggctatattcgtgaagctggttatagtgttgtgatggaaactaacattaacaatcgcccagccattgttgttttattgggtgcatcaaacagtgcaaaccgatggagcgatgctgaaaccattttaactgaattggcttatcgccagtaactttgattggctaatcatttggctgaatagcaaaagccacccaaaactgttttgggtggcttttggtttttttgaactgccccaaaagttagacgctaacctttggggtgctttttaggattaaatctttagttacctttaattgtgatacaggcaagtatcggtaagttaatctttgctattttgaagattggggtcagcaaaaacgaccacttcttcttcaaattcaggtttgactttaaccacaaagtcctctcttgatagacccatcatcagcggaatagagcttgcaacataaatggaagaatatgtaccagcaatcagaccgataaataacgccacagagaaccaatacagaccatcaccacctaagaacagcatggcaacaaccacaacaaacaccgtaccgacagtcataatggttcgtcttaaggtttctgtcagtgataaatcaagcacctgacggggtgttaaaccacgcactcggcgaaaattctcacgaatacgatcataaacaacgattgtatcattcaccgaatagccaatcaaagccaatacagctgccaaaaccgtcaagtcaaatggccagcccatgatggcaaaaataccaacaacgataatcacatcatgaaataaagcaagtacggcacccaaagccagcttgaactggaatcgtgttgcaacataaatgagcatcataccaagtgcaacagacatcgcaagcagtgaatttaggtaaatttcattgcccagttggctgccgataatgctaatgctatcaatggttgatggattatttggaaaattaagaatctgatccaaagaagcacttagattttcagctgagccatcttggggcggtaagcgtaccaaaagctcttggcgagttcctaggtattggacaaccgcatcattaaagccattgtcagccaatgctttaatgacttgtgcttgctcaacaggctgttcataagcgacattggctgacacaccacctgtaaaatccaaaccaaagtttaaacccttgacaatgattgctatcagccctatgagtatagacaataccgaaaatactatcatgggcttttcaagcttcataaaaggaatgatacgctgattagcgatgagtttgacaccaccggctttttcggcagcttcatcaccagcgtcggcaatcaatgattgatcggcaagagcatcttgatttgtggcagcattggcacctttaccatcacgacgcggcacacggcgacggcgtggtggctgtgctgcatttgggtcgatagggttattttcattattcatttttaactcctaaccgatgctaagtttggttaagtttttgcgatgaccataccaaatttgaatcatggcacgagtgactaaaatcgcagtaaacaaagaactgataataccaattgcaagcgtgattgcaaaacctttgattggtcctgttccgatggcaaataagataaatgcaattaatagcgtggtgatattggcatcaaaaattgagctaaatgcacgatcaaaacctgccacaatggcggattttgcacgagtaccattggcaagctcttcacgaatacgctcaaaaattagcacattggcatcaaccgccataccaatggtcaacacaatcccagcaataccaggtagggtgagcgatgatcctaaaatggacataatggcaaccatgataatgacattaaaggctaaagcaatatttgcaatcacaccaaatgcacgataaaacacaatcatccataaaaataccaacagatagccaacctgtgtagagaataatcctttatcgatattatcttgacccaaagatgggccaatggttcgctcttcaacaaagtacatcggtgccgctaacgcgcctgagcgtaacagtaacgcaagctcgcctgcttctgcatctgaatctaagcctgtgatcacaaatgaagaaccaagtaccgcctgaatggtagcacggttaataatgcgtgactcggtataaggtgtacgcacctcaacaagctcgccagttgatgaatcttcttggaagctgaccttttgcttattttcaataaatagcacggccatctgcttgcccacagcagtgcgtgtggcattttgcatgagtctgccgcctgctgtatctagggtaatatttacctgtgggcgtccattctcatccaaacccgactgtgccccttgaacacgctcgcctgtgatgatggtttggcgttcaagcaacatgggctgaccgtccaaagaaccaaatgcaaaagcttcggtacctgcaggtggaataccgcctgcataattcatatcgtgttcgctcaccatgcgaaactcaagattggcggtacgacccaaaacccgtttggcttctgcggtgtcttgtacaccaggcagttcaacgacgatgcggttggtgccttgagattgtaccaatgcttcagccacgccaagctcattgatacgatttcttagtgtggttaagttttgaccaacagcatattcattaatctcttgaattttggcatcagtataagtcagctcaagtgccgcaccttcagtatcagcaaaggggcgtaatgcaaagtctgcacccacttgattttgtaggatagattgagcacgtccacgatcatctgtatttataaaggtaagcaccatgccattatcagtgatacgcaggctttgaacagggatttgctcaccacgcagtgtacggcgtacatcttgactggcagttgcaagacgctgttcaagtgcttttgccatatcaacttctaacacaaatctcacaccaccacgcaaatctaagcccaatttcatgggagctgcacccaaattacgcagccattcaggggtggtttgtgccaaattgagtgcgactacatactgttcgcccaagtctcggcgcagcacttcttgtgccttaagctgatcttcagcatttgataaacgaagtaatgcgctgttattttcaaagcgaccattatggtgatttaatcctgcctgtgtcagcagaccttcagcttgtgttagcacatcttgagttaattgtgtgcctgcactcgcgcctgtaatttgcacagcaggctcatcagggtataggttgggtaatgcgtagatgccagagataaatagcaccacaacaattaatatatatttccaagcagggtagtgcatagagtattcttattaattagatagagcaagataatgggtcaaccccatcacgttgcgaaaaagaccgacccaagcaacttgattgatttatccaaatcattgcttgggcttaggatggattagatattgtcaatggtgcctgtaggcagtaccatgactacgcttgcacgctgaatcttaacctctgttgaatgattcaatgtgatgacagcataatcaccctcaacctttttaatacggccaatcaaaccaccagcaaagacaacttcattaccaacagtcaagccatcaaccatggctttgtgttgcttgttgcgtttagattgtggacgaatgattaaaaaataaaaaattgcaaaaaaagcaacaggaatgagcaaattcatcaataatgactgctgacctgcaggcgcacctgtagacgcatgtgcggcggtaatggccaagtctaacatcaataactcctaaatatcaaaagacggttaatcgttttggtcatgatccaaaaccaccgctcatttaaaaatataaactttacttgatgaattcatccaaccaaatcacacaagtaaaagtcaaaataacgcatatcatagcatatttttataggtctggtatggatttttagtgttgttgctgttgcttaataaaattcgcttaaaacaatacttgcacatcgcttaattttcacttaatatgggcgataatttttacaacattacagtgttatgccccgaccgagaacccaaaatctggcaaatttgtcttttgtttctatcgctatttttactgtatcagtagcggctatatttatcccctcaacggcatttgctgcgtttgagcttggtggcacaccgaccaatcttgcgttattgattttttttatttgtttatctttagtcgtgtcatttttatgctctatttctgaagcgacattgttaaccatgacaccttcttatattgacacgcttgaagaagataatcccaaaggagcggcactgcttaagagtgtgaaagttgaccacatcgaaaaatcaatttcagcaattttaacactcaatactgtcgcccatacattaggttcgcttggtgcaggcgcgcaagcagtgatcgtttttggtaatgcatggtttggggtatttagcggtgtgatgactttgattattttgattggcacagaaattatcccaaaaaccatcggaacggtatattggcgacgatttgctatgcctgtggcgtattatgtgcgtacaatcaatgtggcattattgcccgttatttgggtgactgaaaaaatttcacgcatgttgactcgtggcaatcaagaaattggttttaatcgccatgagtttttggcacttgccaatcaaggggaaagcttggggcagatgagcgagatggaaactcgtattatcaaaaactctttggcattgggcatgattaatgtagaagacattttgacgcctcgttcggtcgttagtgcgtttgatgaaaatatgacggtaggcgatgtctttgccagctatcccaaactacctttttctcgttttccaatctttgatgaagatttggataatgccacagggtttatattaaaatccgatttactgatcgctaaggcaaatcaagaaattcatacacccatcaagcaatttcggcgtgatatcaactttgtatttgccaaaatgaaactatttgatttgttggatttgatgttaaaagagcaagttcacatcgctttagcggtaggagaatttggtgaggttaaaggattggtgagcttagaagatgtgctagaaaccttgcttggtcttgagattgttgatgaatttgaccgtgttgatgatatgcagattttagcacgccaactcatggataaacgcatggcacgcttgggggcaaaactagaagaagatgcaccgtttgatgaaaagtaggctggctctaataaataacttctaaatgaaacaaaatataacaatttgccatcatactttaagcttactgtgttattttggcttaagattactccgtcatacatcatggcgtattcattcattgataagtatattgagtataagggttggtttatgaaatacagcacccgttctgttttaagaaaagccgttgccgcaagtatgctgacggcagtgattcggtcggccattcaattgacaggcaggtcttttggtaaaggtgctagtattggcttatttattggtatgattggcgtacaaagcttaatcactaccaatgcttatgcaatcagtgaacaagatgtcagccgatacgcttcaagtatgagtagcgccgccaacgctcaaaatattgcccaaatttcaagattgattgatgatgatgccatcatttcattgtctcggggtggcaaaacgaccagcttggataaagaaggctacttgcaactgcttcaaaaaagctgggccacatccagcgattatcgctatcgtattaatgtggcagatgtggtagtaacaggcaatcaggctagagctcagattgtaactaccgagacttggactcaagatggtaagcctgtgacaattaagaccgcttctcgagccactttttcgcaggttggtaataatgccgtattattaagatcagtgtcacaagtcaccgttgattaaggcaagtttatcaaccaatttgaatgaaccaccgtttttaggtcaattcggtggtttttattgcccattggccatccaaatggttgccaaatttgtcaaaataaggcattattatcgttcaaaaatcaagttgggttattttgccaatcctccatgataacaattactgagttaggccaccaaaggacataacaatgaaaaaacacaccaaatcttcgatctcaacacaaattttaaagccgctcagtcttgccatttcatcttgtattttggttgcttgtagtagcacaggcacacctgctaaacctgttagccaaaccccaaaacccatacctcaagctaagcccagtcagcagattaatatctcgtcaggtaatactaatttgggtaatactaagactggtgcagatgtagatgttttggatgttcagatgcttgatgcattagaagcgttattacaagcgactgatatgagcatggtggagggtgatgaactggcgattcaacgctatggtaatttatgggatcgggttcgccgtggttatcgcattaatgagatgaccaatgcacgcattgaagctcaaaaatcatggttttatactcgccaaacctatttagatcgcttgactgcgcgtgcttctcgctacctacatcatacggtcgccgaagctgaacgccgtggcattccctctgaattggcacttttgccaatcattgaaagctcatatgacccaacagcgaccagtaatgccgccgccgctggtctttggcaatttattcctagcacaggtcgaatttatggcttgaaccaaagtgccacatatgatggtcgccgtgatgtcattgaatcaacgcgtgccgcttatgactttttaacaagtttgtataaccaatttggttcttgggagctggctttggcggcttataatgcagggcctgggcgagtttcgcgcgccatcaaagccaaccaagatcaaggattgccaacagattattggtcgcttaagctaccgactgaaaccatgaactatgtaccaagattcttagcagtcgctcaaattgtgaggtcgccaaatacttatggcatcaatttacccgccatcgctaaccacagtcattttagaacagtgccagtgaattatggtgtcagcctatctgaggttgccacagtgacaggtttgtcagtcagcgagcttcgtttattaaatcctgcactgttaaattttaccgtggatgagattggtccaaatcgtatcgtcattcctgacagtttgccgaaccaaatcgataatcagctggcttctttaaaaaggctttgaatctgcggcgaatttattgcaacaagaccttgccagagcatcacctatgtggtacctaagtctggtgctacagccaacaccagctctcaacaagaattaatcgcagccaatacactaccaaccaccatcgcacaagttacaccaaataataccattgtgcaagaaccagctttatcaaaatctgagataaatttgattgcagcagaaattcaaaaaaccagtcctgaagtgcctgcaattagccctcaagatggcaatattcagctaaatgcggtacaaactggtcagtcggttttggatgctcgtggtgagactaaaatgttgagttttgcagatgggccaaaaactcaagctgtagcacagcagcccactcagcctgtgcaagtagctgtaacaccgcctgctcagcctgtacaaataacagtggtcagtcctactcctgaaccaatctctcagcccaagcctcagcttccacctgtcacagcttcgataccagtcgtctcatcgccacctgtcttagtcccaccgccaccaagtcggcctcgtcctgaacctgcatcaagacccaagccaaaacccgaaagctacaccgtgcgtgctggtgatagcctaacatcggttgcggctactcatggattaacggtcggtcagcttgccagttataataatttggcgaatgatgcacatatcttgattggtcaaaggctatggcttgtcgctggtaaagtcaaacgccaaccagtatcagcacaaacaccatctcgccaaagcacatcaaccgccaataccaattcagcaacccataaagtatctgctggcgaaagcttaactgccatcgctcgcaaatacaacatcagtttacacgccttagccaaagaaaatggcttaagtgtcacagatggtgtcttaattggtcaaacactcaaattgcccagcgatgccaaaacagccaataccacaatggctaatacatccagctcgccatcagtgaataaacccgaaagctacaccgtgcgtgctggtgatagcctaacatcggttgcggctactcatggattaacggtcggtcagcttgccagttataataatttggcgaatgatgcacatatcttgattggtcaaaggctatggcttgtcgctggtaaagtcaaacgccaaccagtatcagcccaacagacatcacaagccacccagtctactaaaaataatcaaagcaccgccacacatcgcgtccaatcaggtgaaagcctaactgctatcgctcgcagatataacatcagtttacacgccttagccaaagaaaatggcttaagtgtcacagatggtgtcttaattggtcaaacactcaaattgcccagcgatgccaaggctgaaagtagcacaccatctcgtttgggaaataccaaaaataattcgacacgcacgcctgctaatacaaatattggtatcactgaaaattataccgtcagatctggtgacagcctaaccatgctctccaatcgttttggcgtagcaatcggtgatttggcgacagcaaatggtttggcttccaatgccaatttgcgtattggtcaaactttaaaagtccccaagctgacgacgacatacaccgtcaaagcaggcgatgggcttatcgctttggcacgacgctatggtattagtacccaagagcttgccaaaatgaataacttagaacctactgccgatttgcgtattgggcaggttttgactgttccaaataaataatttatacaaggtcttaaaacaacaagcaaccaacttttttaaagctggttgcttgttgtttaatcagcttgttattcacggttttatcatttagcatataaaaaagcggaaaactgattttccgctttttttatatggaaattgccactgatggcatttatgcctgctcaatgtcagctttaagtttggcattatgtgctttgagtgctgttggcatacgctcacccagcttgtcaaaaagttcagcatggctctcaagctctttgatccaagcatctttgtcttgactggtgacaagctcaaattgtgctttggtaaaatcagactgatcccaattgatatcatcataggttggcactaagccaatcggagtgcggacagcgttagcagtaccttcacagcgttcgatgatccattgcagaacacgcatgttctgaccaaaaccaggccatacaaagtcaccatttgtatcacggcggaaccagttgactttgaacatttttggcaactggttgcctgccgccttggcttttttgccaagattttcacccatttgtagccaatggttgaagtagtctgccatgttatagccagtaaatggtaacattgcaaatggatcacggcgtacaacaccttgttgacctgtagcggcggcggtggtttcagaacccatggttgccgctttataaacaccatctacccaatcaaatgcttctgataccaaaggcacagtatctgcacgacgaccgccaaagataaaggcagaaattggtacaccttcggggttttcccattgtggatcgatggacgggcattgttttgcagaaacggtaaagcgtgcattggcatgagcggcacgctctgcacctgtgtgtggctcacgcttccagttggtcaaatttgctggcgtttctttggttttaccttcccaccaaacttcaccatcatcggtgacagcgacattggtgtagataacatcagaacccaaagtactcatgcagtttgagttggttttggtgttggtacctggtgcgacaccaaaaaagcccgcttctgggttgatggcataaagcttaccatcttcagatggcttaatccatgcaatatcatcgccaaccgtttctactttccagccttcatagcctgctggtggaataagcatggcaaagtttgttttgccgcatgccgatgggaatgccgctgcgatataatgttttttgccttgtgggttggttacacctaagatgagcatatgttcagccaaccaaccttgttcacgccccatggcagaagcgatgcgtaatgctagacattttttaccaagcaaagcgttaccgccatagcctgatccatacgaccaaatttcacgagtttcggggaaatgtacgatatatttatcatcattgcatggccatgccacatctttttgcccttcagtcaatggcgagcctacagtatgtacacatggcacatactcgccatcagccccaagcacatcataaacctctttgcccatgcgtgccatctttcgcatactgacgacaacatagggactgtctgtaatttcgatgccaatatgggcaatatgactacctaaaggacccatactaaaaggtacgacatacatggtacggcctgccatgcaaccatcaaacaaatcgttaagtttggtacgcatttggcttggctcgacccaattatttattggtcgcacctgcatcgatttcttcttttgagcaaatataagtacgatcttcgacacgtgcaacatctgtcggatctgagaatgccagatacgaatttgggtgcttgtcttcatctaatttgatcatggtgccgtttttgatcatcagatcgattaggcgctggttttcttcttcagagccgtcgcaccattcgatggcagcaggtttggtcaaagcggcaatttcagccacccaatgaatcaaggcttggtgacgaacaaaatctggagcagttatctttgcagtcatgttgagatctcattttatgaaaattggcgttccactgttttttgtataggcaggcttataaagcaccaaaattgtaacaaaataatgcagtgacgctgtgaaaagcagtattaaaccataaaatatacagaaagataagtactataattaaattaaatagatatatttttaaaattgatgtttaatgataagatattataaagtgtgtttggctgtattagaggttaatttagcaagtataccaaaaaaatgctacaatttgattaaatcatttgaatcaatggattaggataagttatggctaaagctaaatcaagctacatttgccaaaattgtggggcgatttatggaaaatgggcagggcaatgtacagactgcggtgagtggaatactcttgttgaggcacctaacaccagtttgccacatcatcataaatcaaaaactaccacagcacccagaaaaaccgctaactatgctggagcggtgagtgctgtgatgacattggaccatgttggcgttacgctagaaacacgcatgccaacgggaattggtgaatttgaccgagtgcttggcggtggacttgtggcaggctcggtggtgttaattgggggcgaccctggtattggcaaatccacaatcttactacaaactgccattaacatggcagcaggtgattcactatcgggttctgctttatatatcacaggcgaggaaagtctgtcgcaggttgccatgcgtgcagtgcgacttggactaccaaccgatcgcctgcgtgtcttagccgaaactaatgttgataccatttgtgcagcactcaccaccgaacagcctgccattgctgtcattgattcaattcaaacactctttaccgaagccatacagtccgcccccgggggggttgcccaaatccgtgaatccgccgccgtcttaacccgttatgccaaacagacaggcacggcactgtttttggtgggacatgttaccaaagaaggagcattggcagggcctcgtgtgctagaacacatggtggatacggtgctgtattttgagggtgaatcagacagtcgttttagaatgattcgtgccatcaaaaaccgttttggggcggtcaatgagttgggaatttttggcatgacggatacaggattaaaggaggttgccaacccctccgccatttttctaagccgctatgataagcccattgcagggtcggtggtgatggtcagccgtgaaggtacacgccccctacttgtggaggtgcaagccttggtggatgactctcagggtcaacccagacgcatggcacttgggcttgattatcagcgtctgtccatgctccttgcggttatgcaccgtcatggtggcattcacactagtggtatggatgtgtatgtcaatgttgtaggcggtgttaaagttatggaaactggttcagatttggcggtgctgattgcttgtgcatctagcatcaaagaaaaaccactgcctgtcagactgtgtgtatttggtgaggtgggattgtctggcgagattcgccctgtgccaaatggtcaagaacgcctaaaagaggcaatgaagcatggttttacccatgccatcgtccctagagccaatgcacctgcagccaatcatccacaatttaaaaatattcaaatcattgcggttgataggcttgatgaagcgatttatcaagcttttgagattaatgcaggttaaacaccatatgcctattgaattttggaccgatggctcatcgcttataagcccaaaaaatccaccacaaaatcactgcttggctgggcaaataacttgcttggtgtgccaatttgctcaatttgcccatgattcataatgacaattttatcagatatggcttgagcttcttcttggtcatgcgtaaccaagatgctggtgataccaatttcacgctgaatgtctttgagcgaatcacgcagcgatttacgcactttggcatcaagcgcgccaaaaggctcatcaagtagcagcagcttaggctcggtcgccagtgcacgtgccaaagcaacacgctgacgctggccacctgatagctcatgcggatagcgggttttggtgtggctaagttgcaccaaatcaagcagctcatccacacgccgatcgattgtattggcagaagggcgtgtattgcgaggcaacagcgtcaagccaaaagcaatgttttgtgcaaccgtttgatgtcgaaataacgcatattgctgaaacacaaaaccgataccacggtgttgcactggtatatcagttacatcgatactgtcaaaatatatccgcccgttgtctgcattttcaagacctgcaataatgcgtagcaaagttgtcttgccacagcctgatggacctaataaagttgtcagctcacctgttgaaatatcaatgctgatttcacctaaggcaacaaaatccccgaaagttttatggatgttttggattttaatactcatgtttaatactcatagaagataactgtttagaaagattaataaatatatgtaaattttgatgtaagtcttacttaaccaaaatgtcatcagtgctattttttatggctcatcaatccttgagcgaccaaagtaatcaaggcaagtagtgcaagcaagcttgagagtgcaaatgccaatgtaaatgcatattcgttgtatgcaatttcaatcattaaaggcacagtgttggtctcgcctcggatatgcccagatactaccgataccgccccaaattcacccatagcgcgtgcattggttaggataatgccataaagcagcgcccatttgatattgggtaaagtgactttccaaaacatctgccagccgttagcaccaagcgtcaaagcggcttgttcttcgctgtcgccttgagcctgcataagcggaatcagctctcgtgcgataaatgcaaaggtgacaaataaagttgcaagtacaatccccgttgtcgcaaaaatcacctgaatccccatactctcaagatagccgccaagtcgtgtattggcaccaaagaccagtacaaacatcaagcccgccaccacaggcgacacggcaaagggcaaatcaagcaatgtggtgatcacaaatttgccacgaaattgatggcgtgtaatcaaatacgccaacgctacgccaatgatcgtattgatgggtaagataatcgctgctgtgattaaagtcagcttaatagatgcaagtgcatcaggctcaagtagtgctgcttgatacgcttgccatccttcttttagtgcttcataaaaaacagacacgagtggcacaaccagcatgacgcccataaataccaccgctatgccaatcaaactccatctaacccaaggtttatcacgggtggcaggatttttttggtatgaataagagcttgtatgagacatagttgaccttagagtatgattaagatagttgttatcatgataaatcagttggtttttgcgcccagtctggctgagagtttccactggataaaattcatggtaaacaaaaaaaccaatgagattaaaagcataaataacgacacgcaagctgcacctgcgacatcaaattgctcaagctttgagacaatgattaaaggcaaaatctccgattgcatggggatattgccagcgataaaaatcactgaaccgtactcacctgtggcacgagcaaacatcataccagcaccgattagcattgctgggctaatctcgggtaaaatcacacggcaaaatgtggtcaagcgaccagcacccatcaccgctgccgcttcttcaaattctactgaaagctcagcaagtactggctgcactgcccgtacaataaaaggaaagctaaccaccaccaaagccagccaaataccaatcggtgtaaacgcaatttttattggctcattaaacagcagtatcccaaggtgtgtaaaccattgaccaaacaagccattgggtgcataaagtgtggcaagagcgatgccagttaccgctgttggcagggcaaacggtagatcaaccaaagcatttaaaaaggacttaccccaaaactcataacgcaccaacacccaagctgccagcgtaccaaaaatcaaattggtcagggtggcaagcattgccatggataaagatagcttaattgctgcaaacacttgtggctcacgaatcgtctgcatgatgtcatcaaaactcatttgtaatgtcgtcaaaatcatcatcaaaaagggtaaaatcaccaacaaaccaagtgcaaagatactaatacccatacttagcccaaaaaatggcatcactcggcgtgcacgatttttgaggggtattggctgatttagcatgataacaatcctaatgatacgatggatacttggtgataaattcaaaatatagctttactttacggcattggttgataaactttaagtgtaaaaaattgactttttattttcctttatagaatttagatatcaaatttagaccaatgtagcatgcgataccatcatcttgaatcttttgaaggataatagagcttttcaaactttatcaaacatgcgataatagcaaggtttggcatgatcagatgactgatgctatgccattttaactaatcaaaacgctgtaggcgtgaacttggatgattggcgttcgtaattcgccttaatctaaaataaactataaagagatgactatgatgatgaaaaataaatggatgcgtggtttggcgattttggtgttgagcttaccgacagtgacttatgcaaaaactgctgcccccaaagcgtctgaagcacctgaagtatcgttaacccaagaagagcaaatggctatagatttttgtgatttttcagcgtatggtgtgatgcatattgctggcgatcatcaaggtggtgcaacaaaatctgaggcactaaccaaccatgataagcgtatggctgagctgaaggatctcattgaccttgacccagagaccgccacgatgcttgataagtattggaaaggtgctattgatagaatattccaagaatcggttcaaaaaaccgacgccgaaaaacaagcgtttgtgatgggtgtgggcgagtcatctttttattcttgccttgatcaagtgcttaaaactcccaaaaactaatcacaatgctataagcttgatggtatttttatgaccgaaacgactgttaaaaattttgatgatttaccactatccgagccaattttaaaggcggtgcaagcattaaaatttgatcaattaacccccattcaagcacagattttgccacatacattggcaaatcaagatgccattggacaggcacaaacaggcacaggcaagacagcgacatttttgattaccatcattgagtcgctgttaaagcgtccgtttcaagctgatgaaattcgctatcttggcgaacctagagcattggttttggcacctaccagagagcttgcacagcagattttggcagattgccgtgaactgacccgatttagccagctttataatttgtgtattacaggcggctctgattttgataaacaacttgagcagttgcataaaagaccgctggatattttgattggcacaccggggcgtatcatcgattgggttaataaaggcgagctttttttggatcgtgttgaggtattcgtgcttgatgaagctgatcgtatgctggatatgggttttatccctgatatcaagcgtattgtcagacatatgccaagcaataccgaacgccaaagcctattattttcggcaacttttaatcaagatgtgatgaatctggcttatcgttggctacatcagccagcatttgttgagattgcacctgaaagtaaaaccaatcaggcgattgatcaacaattttatttggtcactgagcgtgaaaaaacgagcgcacttaagcaaattttggcagatgattcggtgaaaaaaacgatcatttttgccaatcgcaaagatcaagttaaacgcctatacgattatttgcgtcgtcatcacaaggttacgatgctgtctggagatgtggctcagcaaaaacgagagcgttacttgcagcgttttaaagatggcgaggtcaatgtactggtagcaaccgatgtggcagggcgtggcattcatgtggatgatgtgacgcatgtgatcaattatactttacctgatatgcccgatgactatgtgcatcgtatcggtcgtacagggcgagcgggtttgagtggtgtgtccatcagttttgttagtgaaaatgatgcctttaacttgcctgcacttgaacggcatattgatcaaaaattcaaactcaatcaatttgagtttttagatgagcataaataggaatcatgaacacatgtaccctgatttattagaccctgctcatattccattatcactatacattcacattccttggtgtgtcaaaaaatgcccgtattgtgattttaactcgcacgctttgccaagccaagtaccatttgaaaactatatagaagcattgcttagcgatgctgtatcacaacaaagcttggtatcaaatcgtcaaattgatacggtatttatcggtggtggcacaccatcgttattgcccattgaatcgtttaaacgattatttgacggattgcggttaatttatgattttgcaccgacatgtgagataacactcgaggcaaatcctggcacacttgagcattcaccttttgatgagtatctcactatcggtattaatcgcttatccattggcgtacaaagctttgatcacaacgccttaacagtgttggggcgtattcacaatcctgatcaagcatcaaatgccattcgtgctgcacgcatagcaggttttgatcgtgtcaatgcagatttgatgtatggcttgcccaatcaaaacccatcaaaagcggtgaatgatattcaaactgccattgatgctggtgcaactcacttatcttggtatcaactgacgatagagccgaatacgaccttttattgtacaccaccacagttgccagatgaagagatcatggcagaaattgaaactttgggacaaagtgtactgacaaagcatggattttataattatgaagtcagtgcttggcatggtccaaatgatgctccatgtcagcataatctgaactattggcaatttggcgattatttggcaatcggtgctggagcacatggtaagttgaccttaaaaaatcacccagattaccaagatggcatttatcgttatcaaaaatcacgtcaacctaaggattatcttgcgtttgaagatgcacccaaaatggtcaactttgagcgtatctctgatgacaatttgccgtttgaatttatgatgaatgcactgcgattaaaagatggggtaagcactgatgtgtttgaaacgcgtacggggctattaatcagcacgattgataatgagatgctgcctttacaacatcaaggattgatggttttggatccattacgcattgcaccgacccgtcttgggtttcgatatgtgaattatttggtcagtcaatttatataaactgatagatagaaagacctactcatctgagtgggtcttttttaagattaacttaagataaaattagaaattaagccaaaattagattttcttttcaactttttgtgcggtgtctgatacgcttcgccagcttttgagacatctttaccaaaaccttttatagcgttgcaaccagtcaaaacaacaacggcagcgatagaagcaaccagtacttttttcatgagctattccttaatgatttaattaaatt

SEQ ID NO: 23 - DNA, 33140 bp, Moraxella catarrhalis
  unsure 118: a or g or c or t, unknown, or other
gtctttggaggggcaaactttacatcatcgtggggaacatatatcgtacctgcatctattgccgagcgtccgattcccgctggtgctgccttgactgcgattttttgtattgtggtgncggtgtggggttaccccatggatttggcggtgtggcaacttgtgttatcaacagcacttatcgtggcggtatatgtaccactgctcgaagcaggcatggaaatgactcgtaagggtaagaccgcacagtctgccagcattgtggtattctcatcagcactggtaaatcctgtgtttggttggtctctgaccatgatgcttgacaacttaggcttgattggggataaagaacgcagccgtcagttggggctgtcaggcagagtaatcattcctgtcattggatttgtggtactttgccttgctatggcttcggtaggtatgttccctggtgtgccagcgttgataccacagtttagggtctaatttaaattggtttaatcaatcgctccactggtttggggcgattgtcatgactaacaaaaaataatgtatcgccatagtcattgcaaaatgtagacagctatgctaaattgtgtaatttaaactactgataattaatctattgataatcaaagccttggagatttttatgaaacaaagtgagcagacgacttttaatatgcgtgtagataagcatttggtggagcaatttaagcaagcggcacgagataataaccgtactgccagtcaattattgcgtgattgtatgattgattatgtgaaaaaaaaccgccaagcagatatgtttaagcgttaatttcgtctgaatttaagatggtgtttgatgattgtggttgacagttacacagttttaggagaaattgatggaatttaaacaggctgttgagtatcgccgtgcggtgcgtgattatgactcaaatagaccgctagatccgacattggtgatcgattgcctaaagcttgcacagctatcacccagcagctcaaatatgcagttgtatgaattttatcacatcacaaaccccgatatgctcaaaaaacttaccaaagcttgcctgtcgcaacaagcagctgccagtgcatcacaaatggttgtttttgtgacacgccaagatttatatcgccaaagagccaaatcagcgttattatttgagcgtgataatatcaaaacctacagcccacccaagcggcaaggagccagaattcagcgtatgcaaaaatattatggcgtactaataccgacaatttatcgtacaacttttggtgtaccaagtttacgcagtgcggcatttttagcaatccaaaaatttaaaccaacctatgatcgtgtatctgtggctgatgtgcgtattatggtgcataaaagctgtgctttagctgctcaaacttttatgctggcaatgagtgcagcaggtgctgatacctgtccgatggaaggctttgacagtaagttggttaaaaatctactcaatttacccaaagaggctgaagttaatatgattatctcatgtggctatcgcaccgaaaaaggggtttggggtgagcgatttcgtgtgccttttgatgaggtttatcggcagatttaatcaaccaaatcaaaatcgtttgtttggtagagggtttttaattgaatacttttatcaattgtattggctgatttatttgctttgtgtttacaaaggctggtgtcaaaatctgattgccatgactgattataagacaaaatgattaatacatcataacagctgtgtggtatgatgtcatcattgccatgcatccttaatccatttgcttggcaatacatgacgataccatttgccaccaccgccagcgatggcatcaggcgggttaatctcaccatgaaagatgacaattttggcattgatgggctttttgggtggtacaaaatacgccataggaatcttttgtagacagtggtatttaaagcttacgcaccaagatgaatcccaatattctaaatggtgatgttctctgagataatttgataaaaaggcttgttcatggcgaacctctttacggattttctcaaaattttgttcaaaatattccaataaatgcggataagtatgatatccgacattgaagcgatacacagaactattacccaccattcgccatggtttcttccaatcacgaataatcatcacactgtcatcatgttgggctttgtgagtaaaaaaagcatcaatattatcaatgattacaatatcaatatccaaaaatagtgcagttccttttagcccatataagtcaggcttaaaagtggtgagttttttccagccacgctctgggatatcacttggtaaatttagctctgggatgggatagcaggtgatttcatcacgaatgcctgtgctgttgtcggttagacacaccatcgtaaatggtaaagtcagattacgcttgaccatattatataagcgattgacatattcagcaccgtatttggtaccccatttcatacagatgatgtagttggtatcactcataactatcctttgacatggcttgaagctttatggctattttttttagctcattttcattaagtaaataaggattatttaatagtggtgtatgcttgaaccgacgatagctccacatataatgcaaaaaatgtggataaatcatttgttccatcgcaccatttaaagcagtggttgcaattttggtattttttgaataaagttgttcatcatttaattcataacaaaaaatttcaaaaccatcgccatcttcacgccgaatacagcttaagccaacaagagcacaaccagtttttgcagcaagctttgacgccagcgtactggttagggttttaataccaaaaaaaggagcaatctcaccacctgatggatcaggtacatggtcgggcagtatgatactaaatccacctgctttgagtgttttaaaaattgccttaacaccactagcatctgtgggtacaaggctggcatttagtctttcacgcccctgtaaaacaaagcgatctaccgccgcatttttgatgggcttatacatgatagtaggggagccaaaggtattgagccaagcattcatcatctcccaagtgccgatatgaggcacaatggcaagcataccacttggattggcaagtgctttgattaggatatcttcatgatgaaccgttttaatttgtgcgatagaccattttggtggcattgcccaagttttaagactgtcgactgcactgatgagctgattttttaggatttgtttggcgagtttttgccgctgtgcgtctggcatcttggggtgaaccaagattaaattggcttggatgctgcgataaatactaagcctgcaatgataggaaatataagacgcacacgccgccaatccatgcaggactgacagcggtacatatcttaaaaaaccaagcactgactattctgctttttgtttttcacgaatgcgaatgcccaactcacgcaactggcgattatcaacttcagcaggtgcttcggtcaatgggcaatctgccgtcttggtttttgggaaggcgatcacatcacggattgagctggcaccaaccatcagcataatcaggcgatctagaccaaatgccaaaccaccgtgcggcggtgcaccaaaacgcaatgcatccatcaaaaacttaaacttaagctctgcttcttctttagaaatacccaaggcatcaaataccgcctcttgcatgtcaaccgtattaatacgcagcgaaccgccaccaatttctgtgccatttagtaccatgtcataggcaatggatagggcggtttcgggactttgtttgagttcctcaaccgagccttttgggcgtgtaaaaggatgatgaactgatgtccacttaccatcatcagtttcctcaaacattggaaaatcaacgacccaaagcggtgcccattcacaggtaaataaatttaaatcagtaccgattttaacacgcaatgcacccatagcatcattgacgattttggctttatcggcaccaaagaaaatgatatcgccagtttgggcatcggtacgctcaatcagctcaatcaaaacctcatcggtcatatttttaatgatgggtgattgtaatcctgattctttttcaacgccattattgatattgcttgcgtcattgaccttaatatatgccaatccacgagcgccataaataccaacaaatttggtgtactcatcaatctgcttgcgactcatgttaccgccatttggaatgcgtaaggcaacaacacggcctttaggatcttgggcgggccctgaaaatactttaaattcaacatgttgcatgatgtcagcaacatcaataagttttaagggaatgcgtaaatcaggcttatctgaggcataatcacgcatggcatctgcgtaagtcatgcgggggaaggtatcaaactcaacatccagcatggttttaaataaatttttggttaagccctcggtgatgtccataatctcttcatctgataaaaatgaagtttcgatatcaacttgggtaaattctggctggcggtcagcacgcaaatcttcatcacggaagcatttggcgatttggtaatagcggtcaaaacctgccaccatcaaaagctgtttaaatagctgtggtgactgtggcaatgcaaaaaagttgccttggcgagtgcgtgatggtaccaaataatcacgggcaccctcaggtgtggcacgggttaaaacgggtgtttcaacatccaaaaagccatggtcgtccaaatagcggcgaatggttgaggttgctttggcacgaaatttcatccgctcctgcatttctgggcgacgcatatccaaaaaacgatactttaatcgcagctcttctgagactgtgatgttgtcatcattcaaaggaaatggtggcgtgtctgatttggcaagcagttcaatctctttacccaaaagctcaacttgaccgctgaccatatttggattttcggtaccttcatagcgacgacgcacacgccccgtaatcttaagcaaatattctgagcgagcagcatcggcggtcgcaaatgcttcgggcgtatcagggtcaatcacaacctgtaacaaaccttcacgatcacgcatatccaaaaagatcacaccgccatggtcacggcgacgatgtacccagcctgcgatggtaatggtttggtcaattagctcttcggtcacttgaccgcaataggtgctacgcatcataattttgccccaaaaattgcaaccaaataaaaacagttgcaagaatgattacataaaaaagaatgttaaattaaaaggttttaaacgctacattatgccttttaattgaatttcgtgcaagtattgccgtgataaatttatgatttttggcaatgattagcttgctatacttgattgatgaaattgacaaaaattagcaagaaagtttttctctatctataaaaataaagttacaattgaatacggataaaatttttaacgcttaatcatggataaattgcataaaaatggtgatttttcaagatttttgatggtatctaaaaggtggctatgataggatttgattaatttgatggtgtgagtttgaatggatttaacatttaagtcaatcactgatacttaactttgttgtatttgcggtaaaataaatcgccttatttaggattgtaaattatcgatggtcaccttaaatattttgtatgttgttgcttcattattgatatttgccagtatcatgacaagcacgctttcagcacgcttaggcgtacctttgctgttgttttttttgggcgtgggtatgctggcgggtgaagagggtattttaggcatcgaatttgctgaatataatttggcaaactttatcggtcaggcggcacttgcgtgtatcttattggatggcggtcttcgtacttcaatgcgttcgttccgtgtggggcttaagcccgcggtaactttggcaagcttaggtgtcttggtaacggtgttagtggcaggtatttttaccacttggcttttggatgttgattggcggctgggcgtcttgatggcggcgattgtgggttcaaccgatgcagcagcggtatttagtctgctaagaaatggtggtgtcaagctaaacgaccgtgtacaagccacgcttgagattgagtcaggtgcaaacgacccattggcaattttattggttacggtgatgattaccttgaatcttgatccgacaagccaagggattggtgacattatttttatgctcatcagccaaatcggtattggtttggtacttgggttattgtcaggttgggcattatctaagatgttgccaaaagtttacttggcagatggtatgtatgccattttaattttatctgctggcttgattgtttttggtatcacaaaccttttgggcggttctggatttttggcggtatatttggcaggcgtcgtgattggcaataccaaagtgcgtgccacagagcatgtactgcgtgtgatggatagttttgcttggttatctcaagcggtgttatttgtggtgcttgggttattggtacagccatcaggcatcttagaggtgattcattattactgatttttatctttttattattcgtcgcccgcccaattgcggtatttagttcattgttgccgtttcgttttggcattcgtgagatcggttttatttcttgggttggtttgcgaggggcggtgccgatcacgcttgccattatcccagtgacgatggcggtacctggtgctgacttggcatttaacattacttttggcatggtaattttatccttattggtacaaggtgcaaccattccactgatgtctcgtttatttcgggtgtgggtaccaaccaataatgaaccaaaagctgagcatgaaatttgggtggcagatcaggcgaatattactttatatgaatttgaagtcaagcagggtgcatttgccatcggtcgccatcctcaatccatctcgagtaaatttgacgcccaagccttatccttatttgcattggtgcgtcataataagcttgttaatgtgaatgaagataccatcttaaagatgggcgatgtggtttggtatgccatgcgtggcgatgatgcaccaagtattgccaaaatttttaataattccgccacccaataccaaaaaaatagtgagttttatggcgattggctactgtctcctcatgcacgcattgcagatttgccattttataatttggcagcacgctcacttgccaccaacgcatctagccgcctaccaaagcctgttgccagtgcgcttgatatatttaccgttccgccacaggttggggtaatgactggtattgatgaagatttggtgaataaattgaccgaagctaaaaatcaaactgtcgaagaatttatgatgcagtattttaagacagaacctgtcaaaggagatgaggtatatctgaatgaaacttggtcgctcatcgtgcgtgatgtggacggacgaggtcgcttgcgtggcgtgggtctaaaaaataaaattaaaaaagaggtttaattgagtaatgataaactttcgtttttgatttgtgcgatttttgtaatcaagttatgttgggcatttaaatcatgtattttttccccatttaccaccaaatacgcttttattgattgatattttaaggcaaaattatgttacacacttcaaaaaaacccattgagctacacattacccatctaaataacgctcaaaaagataccaaaaacaaaatcaaaaccatccaatctgagcatcatggtgcatcacacaaattcaaagataaattgtgtcaattattcaaagatattaaaaaattagacaaaaaatgccagcagtctaccgacgatcatacacaaaaagcagcaatttatgtccttgattttgatggagatattaaggcaagtgcggtcgctcatttgcgtgaagagatcagtgccatcatcagtgtggcaaatcgtggtgatgaagtggtcttcgcctcgaaagtggcggcggtcaagtgcatgcctatgggctggctgccgcacagcttgtgcgtatcaaagaagcagggttaaagctgaccatctgtgttgataagattgctgccagtggtggctatatgatggcatgtactgccgataaaattattgccagtgattttgcggtcattggttcgattggtgttgtcagtcagctgcctaactttcacgagtttttgaaaaagcatgatgtgcaatttgagcagtttacagcaggcgagtataagcgtactgtcacgatttttggagaaaatgacgatgaagatcgtgccaagcaccaagctgatattgagcgtattcacgagttatttaaaggttttattcataaatatcgcccccaactggatcttgagcgtgtcgctacaggtgaagtgtggtttggtgaagatgctctagagcttgggttgattgatgagattggtacttcagatgcgtatttgctcgatcagctaaaagcttgtgaagcgtatttgttacattctcgtagcaagccaactttggcagagaaaattggcttggctgagcaacttggtagcagcgtcacagatgtgattggacaaacaggcaatttacttgggcaagctttggctaaatttagcagaccttaagcgatgaccatccgtctttagaagacttaagctaaatgaatgagtactgcgatttgaatcgtacgggcgatatcgaatgctgccaatttaatcgatgatgcagattagcttggatgtaatttctatgaaaaaacttgaagaattgtttagtaaagccgatagatttggacgcattgtcgccaaccgttttaataaaattaaagacttaaatgacattcgtggcattggggcgggtaagacagtgctgattacaggggcaagctcgggtctgggtgcgatgatggcgcgtaagtttgcttttttgggctatgatttggcgatttgtgcacgccgcctagaaaggcttgaggcaatcaaggctgagcttgagggtgattatggcattacggtacatatcaaacgcttggatgtgacggattacgagcagatttttgaagtctttggcgaatttaccaagcaaattggtcaaattgataaaatcatcgtcaatgcaggcgtaggcgacagtcgtgtgattgggcatggtcgatttaatattaaccgtgcgaccgccgaaataaactttattgccgccattgcccagtgtgaagcggcaatgcagatttttcgccgtcaaaatagcggtcaattggtggttatctcaagtatgtctgcggtgcgagggttaccgcgtcatttgacaacttacgccgccgctaaggctggtctcgctagacttgctgagggcattcgcgccgatatgatcaaagaaaagttaccgattacggtatcgaccatttacccaggttatgtacgcacagatttaaatattggggcgaaatatctgccttttgaagttgaagaagatgaaggtgctgatgtcattatcaaggccattgaagccaaagttgatgaagcttatgtgccactatggccatggttacctattggacttggtatgaaatatttgccattaagactaattactaagtttatgtaattaattgatataataaataataaaattatttgttaggtttttgccataggtaagataagtatctggacttggcaaatagacttaaaggttataaaaatagaattgatggaaaagtcatgagtcaaagtaataaagtagccaacagcgagtctaataccgttgttcgtacagtcgctgataccgctgaaacagccaaagaggttgtgacagatgcagcaaggctgacgaaagatacccttgagcatggtgccaatgatactttacaatttttgggcgtaccaattgatatcaatacactaacccagctggcaattgacttttcggggcgtttggtatcggcattgctgattttctttgtaggtcaatggattggtaaacgcatcgttggcgttgccaaacacattatggtaaaaagccgactggatcgcacggctgccaactttttgggtaatttgttatatggtttgatgttggtcacggtcattttggcatccttgaataaattgggcgtcaataccaattcatttgttgctgtcttgggtgcggcaggtgttgcaattggcgtatcgctcaaagaccagttatcaaacttggcagcaggtgttttgattgtgatttttagaccatttgggcgtggtgatttggttgagattggcggtaaacttggcacagtacttgatattagcttagtcaatacccgtattcgtaccgcccataatcacgagattattatcccaaatggtgatattatgacctctgctagtatcaactattcctccttgccaaatcgccgtgtagatgttgaggtgggtatcggttataatgcagatattcgagaggcacgcaaggtaatgattggtcttgccgaagcccatccaaatgttttggatgacccaaaaccaactgtcattgtcacagcattggccgatagctctgtggatttggtgctgagagtatggaccaataatgacgattggtttatgacgcaagcagatttgcttgagcaggtgaaatatgcgtttgatgaagcgggcattgatattccctttccgaatcgtacggtacagattgaagggctgcagatggataaagttaaaacaatttttgaatcaaatgccaagcatcctgagcctaattcatccaatctataaacagcctaagtaaatttaatcaatccatatatttaagccctgcgtatctatgatgatacaagggcttttttgcgaaaatcacaatcaatcaaatgatcatttaccatgccaactgcttgcataaaggcatagcaggtcgttgaaccgatgaacttaaatccttgctgttttagggcttttgccaatcttgccgagacttcattttgggtgggtatgtcggcaagtgttttggggtagttgatgacgggtttgccatctggtgttgtaatcccccacagatagtcactaaaactttgatgctctgtgatggcaaggtaggctttggcgttattgatgatggcgttgattttaccaaggtggcggataatacccgtattttgcattaatgcttcaatcttagcttgatcatactgagtaatttttatggcatcgaactcatcaaaggcatgataataattatcacgcttttttaaaatcgtaatccagcttaagcctgattgcattgactctaggcaaagttgagcaaatagcctctggtcatcataaatgggcttgccccactcatgatcgtggtagtgaatgtaaagtggatcggacaagcaccaactgcagcgattgactgtttttgcgattggattgttcatatcaaatgtgataatcaagctctaagccttcgccatcaaaaacatccaaatcatctttgcacagtgattttatgctttggggattaaaatttggatctagttttttgactgcggcggtgagttcacagatttgcttatcacgctcttggatatgtgccaataaagctgcaatacttgatgcaacagggtctttggaatcaggttttaagccataagcgttaaacagctccttagattgtgcgtgatgtttggtggatatttgttcttgtttgtgcttgacgaccatgcgggcggcactaccgaccatcgtggcaccagctggcactgcctttacgacaacagcatttgagccaatcttggcatcatcaccaacacgaaagccacccaaaatcttagcacctgcaccaacaaccacattgttgccaagggtcggatggcgtttggcacctttttcccaagagacaccacctaaagtgacaccatgatacaaagtaacatcatcaccaatttcggcagtctcgccaataacgacgcccatgccgtgatcaataaaaaaacgcttaccgatcttagcggcagggtgaatttcaatgcctgttgtgcagcgactaaaatgagaaagcgctctggccataaacttatggtccaaattccacaagtagtgtgcccctcggtgcatgatacgcgcatgaatgccaggataggttaacagtacttccatttggctgcgtgcagcagggtctcgtgcaagcacagctttcacatcatctgtgatggtgttttttaatttcaacagtttttttagcatgtatttttcctaaaatttctctcatcatatggctgaatgtgagatttatcaaatcaagcctagtataccgatatgattgaatgaacggcgatgccacccaagctaaggcaaattctgattaatcttagcaatcaaagcacggactaaggcgtattctttttggtctagttgcaagcgacgattcaagcgagataagcgatttggtaggtgcttaagatcatcgtcgtgtgcaagattgagccgttgcatcaatgtgatgatggcactttcaagattggctgactgtgcttgagtgatcgcaggctcatcccagtcgctgcgtatgtgtatgggcagcgagtattcctcttttggcatgccttgtatctgcttggtactaacaagagaagatggtgtaagcgtactggcaaattgatcaaaaaaggtagctgtgatgacttgtatggcactggcaacattgagtacaggataattcaaattggcaggaatctggatatgataatcagccaatgacagctcttcattggtcaaacctcggtcttcacgcccaaataaaatggcaatcttgggcaaggtattaaccaaatcatcagctgattgattcatatgatccaaagatgtcgccaaagtattttttgagacagtctgtgataattgcttaagtgcaacttgtgcagccatgcttggcgtcagcacaggcctaggcatttggcgtgatcgggcactggctgcaaaaatgagtgtgcaatcaccaatggcatgtttgatatcttttgtgatgcaagctttgtccagtaatatgcctgcacctgctgcattggcataactgctgtcatcaatcggtaagcgtggattgacgaccaccaaatcatctaagcccatggtatgcagtgcacgcgccgccgagccgatattggcaggtagggtagtaccaaccatcacgatgcgaatgcgtgatagccaagatttgagtaaatcgttcatcattatcgaaacaccaaatgatcatcagtgatatgattttttaattgagcaatattgtggtcgctggggtatagccgtaatcggtcattggtttggatgcgtgcaacactgcattcatcatataagtataatgataaaggtacacataaatcgcccacttgactgatgtctatatcatcatgctctgaagttgggtgagagcctcgtttgattagctcaggcggtgggctattttcttttatcacacttaaaatcccctcaagtgcttgagtgtcatcacaagcaagctttagatgaatttcctttagtcggcgaatccgagcattttcgatagactcaatgtgatgcaggcgagtaaaaatccgaccatcatcattttctcggacgctgattttggcgatgacgatatttgcaatggtcatatttgcacgctcacctttggtgtataacggtttgtattcttcatcaataccaagcacacgcttacctgcggtcaaaacttctttaaattgattaaaagtctcaccatagcagctcatttcaatgcgacctttgccatcgtcaagcttgacgacaatacgctccccaaaaaatgccacatcataaatcaagcctgcaatccatgcaaagcctttggcggtatcttttaaatcaacgacacttttaacagtagtatataagggtagctcactgcgatattcatccaaaggatgaccagttaaatacagcccaagcgtcgcttgttcatagcgtaagcgatcttgtggctgccagtagacatcttcaagtggcggtgcgacaaatagtgaatcatcgacatctgtaaataaatccatcgtcccaattaattggttttggcggttttggtcggcagctgccattgcttcggggagctgccgccacaagccacggcgaatttggtaactgcaatctgagtgatcggtgatataatgtggttttaaggtttcggctaaaatatcaaaacagcctgctttaatgagtgcttctagtgagcgtttacccacttttttgatgtcaacacgattacaaaaatcgtataaatccttaaaagcaccgtccttgcgtgcagcgacaatgctattaaccgcctcttcaccgacgcccttgacagcaccaagcccataaacaattgtcttggcatctctgaccacaaatttccattggctatgattgacactgggtgggatgatagttaacccaaaattatcacggcaatcagacagtaaaaaaaccacctggtcggtatcatccatttcagatgttaagaccgctgccataaattcagctggataataatgctttaggtaagcagtctgataagcaagcacgccataggctgccgaatgtgatttattaaaaccgtagcctgcaaatttttcaaccaaatcaaaaatttgtgccgccaaaccgccatcgatattttgctcaatcgcaccatccacaaaagtgctacgctgcttggccatctcttcgggttttttcttgcccatggcacgccttagcatatctgcaccacctaaggtataacctgctaagacctgtgcaatctgcatgacttgctcttgatagacgatgaccccataggttgattcaagaggtggttgcagcagttcatgctgaaactgaggatggggataagccacttcttgaataccatgctttctgtcgataaaatcagacaccatgccagactcaagcggaccgggtcgatataaagcacacatcgcaatgatatcttcgatatttgagggcttaagctgtgctaagtattttttcatgccgctactttctagctgaaataccgcactggttttggcctcttgaagtactgaagtgtatacatcggtgtcatcgagtggcaaggtttctaaatcaattgaggattgaccttgagcttgacgagtttggttaatgttatcaacagcggcttgaagtacggtcaaatttcgaagtcctaagaaatcaaattttaccaagccgacagcttcaacatcgtccttatcatattggctgacaggatgaccttcaccatcacaatagatggccgaaaaatcactgatgcgattgggtgcgatgagtacgccgcctgcatgtttgccgacattacgggtgagaccttcaagctttttggccatctcccatatctcaagagccaattcatggtctggtgcatctggattggtcagcagctctttgagttgaggttcttgatcaaaggcatcttcaagcttaataccaggtgtttttggaatcatctttgagatgcgatcacccagaccaaaaggcttaccctgaacacgggtgacatcacgaaccaccgcacgcgccgccatcgtaccaaaggtgatgatttggctgactgcttggcgaccatatgtttgtgccacatagtcaatcacacggtcacgcccttcgatacaaaaatcgatatcaaagtcaggcattgagacacgctcagggtttaagaatcgctcaaataacaaatcatagctcaaagggtcaagatcagtaatattaagcgaataagcaaccaaagagcctgcacctgagccacgaccaggaccgacaggtacgccattggcttttgcccagcggataaagtccatgacaattaaaaaatagccaggaaaacccatcttaagaatgatatcaagctcatagtcaagcctttcatcataaggtttgcgtactttatcccaatcatcatctcgctgatcaacaggataaagtttctcaagccgtctgtttaagccatcagcggatacttttttaaaaaaagtctcaatggtctcaccttttgggatgggaaaatcgggcagaacattaatcccaagtgtgatagttatattgcatcggctggcgagtaggcgcgtatttttaattgcttggggcagatcggcaaacagctcggccatctgcttttggcttttgaaatattgaagttcggtgtattctcttgggcgtctgtcatctgctaaggtatagccatttgcgatacacacacgagcttcatgtgcatcaaagtctgtactgacggtattatttttgtcatttgtctcagttgggcttgcgtgaataaagcgtacatcattatgtgcaatgatagcaatgccaagcttagcagcttgaatgatggcactttcattaaacttatcatcgctggctttgactcggcgaatgccaatgtagagcctatcgccaaaaatatcttgccatgtttgtaaaataggcagggcattgtcagggttattgccaagtaaaggctgagcaatctctgagcgatgtgttaagatggcgattaattcatcggaatattcagccaaagccgctttggtgatgacgggtgtttcaaactctaccgaaccatgattattcattgggcggttggtataagcatctgaaatcaaacgcatcaggttttggtagccatgatggctcatcgcataaaggatgacgctgtggcgtgcgtcagctgcatctttatcactatgctcaccaaccaccacctcagccccaatgattggcttaatgccagcaccgatacacgctttataaaacttgactgctgcaaacatattattccagtcagccaaagcaagcgtatcttgaccatcagcgacggcggctttgaccaaatctttgatacggacaattgagtctataatggcgtattcgctacgaatacctaaatgtacaaaggacataatcttctaattttgagttaagctgactgtgcctaaaacacagaaaaccacaggaatgggattgacattgtctgaatgatgattttggaattgaccaaacacatatgcaccaatcaacaaaaggatcataaatagcatcagcatacgaatgatgcttaacataatattaaaccaaaatcatattaaaccaaaatcagccaattatcattcagccactggctaagccaaggcagattttgtaaattggcgtcttcggcagtaatggcatcaccgtgaatcaaatgcttaagatatgctcgttcatcatctgacaagtcaactttttcgccattgatataccacacatcacgcacatggacaaagcggcaggcagggtttaataccaagcactcaccatcttcaaggcgagttttgagtgtatcagcgtcaagctcatcttcaaacgcaagtaattcatactgacgctgactgaccagctcgccgatggcatctgtcaataacgcatcgccttctttggaatttagcagggtaattagcttatctttgagtgcttgaatgctatcttggctaagctcataggcatctggctggtcagcttgcggtaaggttaggacatgaaacagattggcgtgattggtggcgacatctgccagctcgtccataatttgtacaagattgggtctgcgaaaaccaaatgaaaatgtcaagcaatcattcatcgcaatcccatgatggctaagccttggcggtacataaagcacatcacctgcttgcaagacttcatcaaaaataatcttacccatgtcatctaaaaggcgtattggttgattaggcacaaaaggggtatcagaagtacacatcttgcccaactgccatcgacgcgcaccataaccttgggcaagaaatacatcatattcatcataatgtgcacccaccgaaccgccttttggagcaacagataccatgatatcatcttgttgccatttgggaataaaatcaaaatgcgaccaaagctcaccaagctcaggcgaccattgctcaagattttgtaccaagattgtccaaagcttgggggcttgatggatatcgtcctcatcaagtggtgcagattttagcgaccattgattgatatttttatcactttggctgatcaatcgagcagacacgccttcttcaagtgccaaaccaagtatatcttcaggctcaaacatccctatcaattcaggcaaaccccccttaattagcagcggctttttttgccaatattctgccaaaaaagtcttatggctcatgcctttgggtaggcaaaatcttatagtatcggtcatgatggtctcaaaattaatcaaaaaatgcgataaaatttggcatactttatgcttaatataaacctttagtttaacaattttttggtttaaaaccaatcacattcaccaaattttagtattttttgtggtttttattgaataagattgtaccaagattttggttggcatgatgaaaacagtggcaaatttgtgctaagttgattataataaaaattatttaaatagcactgtgacagggcatgacgaaaaggcagcttgatgacaactgatacccactttgacgctgacgatttggcggaatatgactttgattatacgatgaatgaaaatggtcagctcacccaagcggagattgctacattatataccgagcttggtgaagctgagcaggcattggtaaccattcgtgattttatccgctttgtggtgaccaagcttcgccagtatgatgtcgttgtggcacaagggacgacagatgagtttgctgaagcggcggcaattgttttgcattctttatcgcttgaatggtcggcagatgagcagattttggcgtgtaagctgactcccagcgaaaagcaagaagtcttgactttattatctgagcgtatcattcagcgtaagcctttgtcttatttgattaatttggcgtatttttgtgggctgcctttttatgttgatgagcgtgttttgattccacgctctccgattgccgagctgattaatcagcagttttatccatattttgatgtcgatgatgtacgcaaaaactcattttttagccacggtttagaagagtcgcagttggcagcacctgagcgtattttggatttatgcacaggttctggttgtattgccattgcacttgctaaggcatttcctgatgccaatattgatgccacagatattgataaagatgccctagaagtggcatggacaaatgttgagcatcatgagcttgctcatcaagtcaatctacttgaatcaaatttatttgccaaactgcccgctgaaaatcagtacgagcttattgtgactaatccgccttatgtggatgcagcggtaatggcagagctgccacctgagtttttgcatgagcctgaacatgcacttgcagcaggtcaagatggcttagatttggtacatcaaattttataccacgcacctgattatttgaccaaagatggcttgttggtttgtgaagttggtgatagcgagtgggcgctacgccaagcttatcctgaaattcagtttgattggctgacctttgaaaaaggcggtagtggtgtttttgccatcacatgcgaagagcttttggaataccgagaagattttgccaaacaagttgagcgtgtgcaaggtttgacccactgataccgttttatgatatgtttaataaaaagcaaatggaacatccgtttgctttttattatctgtatctgattattatctatatctgagtgcattagcatgactttgatgcaaaattttagtataataatgggtttaattaaatacttgtatagagtgtaccgtgaataaaattcctgtcatcacctccgctgagcagtccgaccaagcagccaagaaagttaatcttttaggtatgtcaaaagatgaattatcggcattttttgtgtctttgggcgaaaagtcgtttcgtgcaacgcaggtgatgaagtggatttatcaatttggtgtgacagatttttttgagatgacaaatatttcaaaaaaacttcagcataagctacatgaggtagcttgcgtcgtgccgccgactgtgaaatataaagaatttagccaagatggtacacgcaaatgggtctttgaggtggcgggtggttcgttggttgagacagtcttgattcctgccgatgatggtaagcaatttgggcgtaagactttatgcatttcatcgcaagtgggctgtgcgttggattgttcgttttgtagtacaggtaagcagggttttgagcgagatttaacgccaagcgaaatcattgggcagctttgggtcgccaatcagtcttatatggaaaatgtgccgccaaccgagcgagaaaaccgtgtgaccaatgtcgtcatgatgggcatgggtgaaccgttattaaactatgatcctgtggtggcgtccatgtcacttatgcttgatgatcatgcatttggcttatccaaacgccgtgtcacactttcaacctcaggcgttgttccaaaaatgtatgatttggccaaagatattgatgtggcacttgccattagcttacatgcacccaatgatgagcttcgtaatgaacttgtgccgattaataaaaaatatcctttaaaagatcttattaaggctgccaaatcttatgtgtacgatgaaaatcctcgccacaaaaaacacattaccatcgaatatgttatgctggcaggtgttaacgattctgatgaacacgcacatcagctggttgatttgctaaaagatttgccgagcaaaattaatttaattccgttcaatccatttccgcacgcaccttatgggcgttcaagcaataatcggatacatgcttttagtcatattttaaaccaagcaggatttgtttgtacaattcgccagactcgtggtgatgatattgatgctgcttgtgggcagctggtcggtcaggtcgctgatcgtacacgccgtgccaaaaaatggcaagaaagtatccaaaaacgccaaagccatcatgaatgaattgatacatctatttactaatgatatcaaagcctgatagaatggacgctacatgaaaatccgagtaaagtggcctatggtaatggcgatggggctggttttaagtgcctgtcaaagtacaccaataccgcctaaaaataatccgcaattggcacaaatccgaacccaaattgcaatctcgctactggacatgggtaagcttgatcaagccaaacagcagttggatgctgctttatcggctgatcggcagtttgcacctgcctatcgcaccttggcaaaggtttatcaagcttcggaggatgccactcaccaaaccaaagctcaacgcttgtttgaaaaggcgattgaactaaatcctaaagatatgcaaagttatatggattatggattttatttggtgcagatgggggacttgtcaggtgcgttgatttattttgataaacctagccgagccatcggttatgaagggcgtgtggtagccatcgaaaatatggcatatatttattatcatcaatatgaagctgccaaatcaccaacaaaagatgactataataacgccaaatcagcacttgagcgtgcgttaatttcaggcactcaacatgatgaaatcaaaaagtcttatgacaaattattaagtgattataaattattaagtgattataaatagtttatgatgattatcacgccatgtatttggtcaattgaacaagaataacggtaacaccatgtcaatacacaatccgattaaacgccgccctaccaaaaaaatctatgttggcaatgtcgccatcggcggcgatgcacccatcagcgtgcaaagtatgacaaatacaaacacctgtgatattgatgcaacagttgcacaaattcagcgatgcgtggacgcaggtgcggacttgatgcgtgtatcgacaccaacgatggagagcgtcgctgcctttgctgagataaaaaaacgcgtatccattccactcattgccgatattcattttgatcacaaaatcgccattgcagtggcggatgtgggtgcagactgcctgcgtatcaatccaggtaatattggcaatgatcaaaaagtcaaagaagtggttgcagcggcacgccatcataatgtgccgattcgtatcggtgtgaatgcaggctcacttgaaaaggatttacaaaaaaaatatcgagaaccgacaggtgaggcgatgctagaatcggcgttacgccacattgatattttagaaaatcttaattttcagaattataaaatctcagtcaaagcctccaatgtatttttaacccttgatgcgtatcgattgatttcagcacaaattgataatccattgcatcttggcgttaccgaagcgggcgtatatcgcactggcacggtcaaatctgccattgctttgggcggtttgctacttgatggcattggcgataccatgcgtatctctttggcggcagcaccagaagaagagattaaaattggctttgacattctaaaatcactgggtattcgtagtaatggcgtcaattttattgcttgtccaagttgtagccgtcaagagtttgatgtgatcaaagtgatgaatgagcttgaagctcgcttagaggatattcgtgagccactagatctgtcagttattggctgtaaagtcaatgggccaggtgaagccaaagaagcgacgatcggtgtcgtgggagccagccccaatagtttggtttataaacatggtgcaaaaagccatctgattgataccaaaaaattggtagatgagattgaggcgatggtgcgtgctcaagtcaaagacattcaagataaacgggcaaatgagattatccgtataggctaaatgtatgagcgatcaggataaattgggctttttagatttggcggtgcatgcgatgaaaatggtcaatcgaccaatgacaacgatgcagctgtgggagtttgttcttaaaaataaattgcatcgtcggttaagatcttatgatgtttccaccgaatctttcattggcaaatcaccagaaagaacatttggtagttcaattactcgcaataaacatatcttcaaggaagttccaaatacaaataccaagccaaaacaatatatttcaaactctcagcaagcaaagttagaagtaacaaaaaatcttaatcaagctactcatcgcttagcaaaatatcgtgagcgagagttgcatcctatcttgacttattttttgaaatttgataaatattttcaagcttattcaaaaaccatttttcatgaaatcagtccaaaaggagcaaaaggcgaggataaatggctgtatccagatatggtggcggtgcattttgaatacgccaattaccaaaaaaaccatgtacttgattttattacgaaatttaataagccgccaataaaaatctactcatttgagattaaaaaagagctaaattttagtaattataaagaaagcttttttcaggcagtcagtaactcaagttgggcaaatgaaggttatttggtggcggcacaaatcctgcctgatggtcaatttatcgaggcactcaaaaaacttagccaaagctttaggattggtattattgagcttaatagacacaatgtgaaacaaagtaagattttatcacctgccaaatttaaagagatgatggattattcggtggttgatgaattggcgaataaaaatgacaatttctcacaatttttaaaaaccattatcgattttgatgttaatcatcctcatcgatatgacagcgagtttgacaaaatcttaaacctatatgaaccgaatgacagcaatcattaattgtatataattaaggaatatttatgaataaaattaccgctatccgtggctttaatgatgtgttgcccgagcaaacaccagcatggcgtgcaatggaacgaacattaattgaggtgatggatagctatggctatagccaaatccgtttgcctttggttgaagaaactcagctatttgcacgaggtgtcggtgaagcgacagatattgttgaaaaagaaatgtttggcgttgtacatggcggaaataagggcgatgaaggatcttcttttactttacgccccgaaggtactgcaggatgtgtacgggcaattgttgagcataacttaactcgtggtgatacaccaaaattatggtacttaggcccgatgtttcgttatgaacgcccccaaaaaggtcgctatcgccaatttcatcaattgggcgtagagtattttggcgctgagttgcccgatgctgatgctgagttgatcgctatgacttatcatatgtggcaaaaactgggtatcggtgagcatgtgacactccagctaaatactttgggcgagaccgatgagcgtgttgcatataagtcagcactggttgaatatttgacaacacaccaagaggctttggatgatgattcaaaacgccgtttaaataccaatccactgcgtattttggattccaaagatgaaaacactcaacaaatcctaaaaaatgcacctaagcttggtgagtttttgggtgaggcatcgttggctcattttgaaaaagtacaaaactatttgtccgcattgggtatttcgtttgagataaacgataaattggtgcgtggcttggattattataacaaaaccgtttttgaatgggtaactgacaaattaggttcacaagcgaccgtctgtggcggcggtcgttatgatggcttggtgggtattatcaaaggtaacgctgagcagtcagagcctgcggttgggttcgctatgggtcttgaacgcttaatgctattgattgatgccgttaatccttatcaggtcgcatcttggtgtgatgtttttgtgattgctcaccctgattattatattgatggcttaaagtacgccgaatcacttcgcttgcgtcaggataatttacgcgtcaaaatggcaagtgcaacaggcttaaaatcacaaatgaaaaaagccgataaatcaggtgcagcttatacggtcatcatcgcagaagatgaggtaaatgccaaccaaatcaccattaagacaatggcaactggtgaacaacgccgtgcacccattgattatcaatttatacgataaaatatgcatgacttatgcgataaaatctatatggataaaaaccgcatgaaaatggttgtgtgtgatataatgcatgcaattttcaattagagtttgattatgattgacactccgaagaatgataataattttactgatcaaaaatctttaaatgccttaaaattgcatggcgaaaagattatttataccgtacttttggtattggctgtcttttttggttggcagtattatcaaaaaaattatgccaagatagatacggtcgctgcagatacttatacttcaatttcggtgcgtgatgagcgactggtgcaagcgtatttaaatccacaattagatgaagtggctaagcaggcattggcggaagaagaaaagcagttatttggtgatattgatgcacttgtcgcagcacatgataatactgtttacgcttggcaagcattgatgatcaaggcgcgccaccagaccaataataacgatcttgacggtgcggtcgcaacgctcagccaagccacttcaatcaatcttgacgatgacggtttgacagcaatagccaaaatacgccatgcacgagccatgttggcaaatggtgatacaaacggtgcgttatcgattgccaatgaagccatgccgacagcttttgaagcatcacgccaagagcttttgggtgatatttatcatgccaaaaatgaaattgacaatgccaaatctgcttatactaatgcatgggaggtgctccgtgagcgtcaagaaaaccgtgcggtattggctttaaaattacagtcacttggggtgaatgttgaaccaatcgaacctacgccatcagtggtatcgataccaaatactcagccagtcattgaaggtggcgaggtgtttgagatgattgagcatgattcagcagtggcagacacacaaaacccacacactggcaattagtgcttacaaaagattcgttaattatggtcaaataaacttaattaaaaatagcaaagtaaggatatttttatgtatcagcgctttatcaataccgcattggttgcagctttggcggtaactatggcaggttgtggcaccaaagccatcaagccaaccgaacgcaagcctgccaaattggttaatattcagacgccagtcgctgtattaacacaggtatcaagtatccgcttggatcaaggtcgatctggctttagtcgtcgtaataccaacctaagaaaggatgttattgatttacaaattgcaccgttggcagatggtatgattgcagcaagtcgcagtggtatcgtcagtggttacatgggtgaatcgattgcttggcaatataatgctgaagatgtgatcactggcggtgtcggtattgatgatcaaggtagtgtggcggtcattggtacgcgttcagggaaattaattgcattagatgctcgcacaggtgcagcacgctgggtagtagaattggcttcttctagtttggcaccagcattgattagtggtgataaagtgattgtcatcactaacagtggtacgatttttggattggatattaatagtggtgcgacagtttggcagtatgccactcaggtaccaaataccagtgtgcgtggtatggcaaagcctttggcgcttgatgctcgcacggtattgattggtggtgctgatgggcgtattcatgcactagataccatgacaggtgcaccagtgtggactcgccgtgtgggactggcgatgggttctggagaaattgatcagctgcgtgatattgatgggacaccgaccgtcgtagatcattatctatacgctgccagctacagcggacaattagctgggtttgatatgacaacagggcgtaccatgtttgtcagcgagctatctagcaccaaaaagctgaccactttggctgatgctgtcatcggtagtagcactgatggtgatgtggttgcctttaaccgaatgactggcgagaagctttgggaaaatcatgatctaaaatatcgtggattgaccaatcctgtaaccatcggcacttatattgctgttggggatgcagatggtgtggtacatattttaaatcatcaaggtcaaattatcagccgagccaataccaaaggtgctttgaccaacttaactgtgatcaataatcgcttatatgcccaatcagcagatggcgttgtgactgtttggcaattttaaataatcaataaaatcagcatcctttgtcatgatatcggtggcaaaggttttgctgttttggttgaatgatgattgatgcctgatcatccaaatcctcattgcgacagattcaattttaacgatattaagagtaaaacatgagtataaaacctgtggtcgccttgattggtcgccctaatgtcggtaaatcgactttatttaatcagttaacaaagagtcgtcaagcattggtggcggatttggcgggtctaacccgtgatcgtcagtatggtgatgcacattttgaaaacaagtcattcattgtcgttgacactggcggtatcggtgagatggatgatggttcgggcaatattgatgattatatggcgactcagtcatatacggcgattcatgaagcggatattgttgtttttgtcgtagatgctcgtgcaggattgattggtgcagatagtgagattgcacattttttacacaccttgggtaagcctgtatttttggtagcaaacaagatggatggcgttcatgaagcggcatatgcagagttttttgctttaggttttggtgaaccgtatgctaccgcagccagtcatggtagaggcgttaccaatttgcttgagtctttgacggcggatatgcctgaagatatgcccaaagatgagcttgatagcaaaaccttaaagcttgccatcattggtcgccccaatgtcggcaaatcaaccttagtcaatcgcttgctgggcgaagatcgtgtggtggtctttgatatgccaggcacaacgcgtgacagtatttatattccttttgagcgagaagggcgtagctatgtcctcatcgatacagcgggcgtgcgtcgccgtggtcgcattgatgagaaagtggaaaaattttctgtcgtcaagacgctacaagccattaaagatgccaatgtcgtggtgctggtcattgatgccaaagaaggtattgttgatcaagatttgcatatgcttggatatgcactagacgcagggcgtgccattgtcgtggcaatcaataaatgggatggcttaagccaagaccaaaaagactttgtcaaaattgaaattgaccgccgttttaattttgtgccttgggtaaaaattcatttaatttctgctttatatggtaatggtgtgggtaaactttatccttctattcataaagcctatgaagcatcaatgtttaaggtttcaaccaatcagctgacacgaattttagaagatgctgttgccagccatccaccaccaatggtgggtggtcgtagaattaagctaagatatgcacatttgggtgggcataatcctcctgtcatcgtcattcatggcaatcaaacgagcagtctgccaaaaagctatcagcgttatcttgaaaatgtttttcgcaatgtctataaactcgaagggacaccactgcaggtagaatttaagcaaaatgccaacccatatgaaggcaagaaaaatcctgtcgttaaaaacaaagccaagttgatgcgtgagaaaaaacgcattcagcggtttaagcgtgccgagaaaaaacgataaaagcaggtaatatgcactttattaattggcagtcactgagctgttatgtgcttaattatctttattgctatgaatgccaatagttagaattaataaatccttgattgtataattcacgaatcggtgagaagctacgccgatgctcaggtaaaataccatattctaagatggcagctttatgcttggcggtcagatagcctttatgtttatcaagcagatattcaggataagatttggcatgctgaatcatcaaacgatcacgatgcactttagccaatatgctggcacaagcaatactgctatgagtagcatctcctttgatcatggcataaatctgatgaaagtgttcgcccaaactgccatccattgaaggtagctgattgccatctatcaaaatagttgtgtttttttcatttaaattattcttaataataattgtctcaatggcaattttcatcccaagcatcgttgcttgataaatattaatctgatcaataatagtgcttggtacatcaacaatcgcataatcaagtgccaaatctgtgatgatgtcaaacagttgttctcgccgtttttcactcagctttttactgtcatttaataaagaaattttagtatttgttaaatctatctcatcaaagcggccgctgagttcattgggcaagataaccgcaccgacagtcatattgccaaataaagcgccccgtccaacctcatcgataccgacgattggggcatgacttgataaaaccgcattgggtttagtgaagatggtacaatcattcataagctttggtgatatggtgtgtgtcatatgattttttagtactcataaaataatgatccagcacggctttggcggagttttggtgactttggctgcgtagccacgctgaaatattgctaagctgtttggtttgtttgtttgggtggtgaataatccctaatgctttggtgctgactttttcggcggtggcgtcagattgtagtagttcaggtacgattggatgaccaagatactgcttggccaagatattgggcaatgacacataaggaattttaaccaaacgcttggcaatcataaaagtaagcggattgacttgatagacgacaaccataggacgctcaagtagtaagcattctagcgttgctgtacctgatgccaaaagtaccacatcactgatggtcatacacgcatgactgatcgcaggttggttttgtttttgagaccgattgtgatcatccaaaatatggacacagttgaccaaattggcatgatgagtgtgcaaaatttcatgcactaatcgtgcatgctcagcactcacgactggcagcacaaactgcacggttggtatttgctgatgaatgttttgtgcacttgttaataatagcggtaacatggctcggatttcagaggtgcgtgaacctgccatcagacaaataatatgacttgcttttgtgagtgatgttacactatgatggtgattatgatattggtgaataaaattttccaaacgcacctttgggctatcctgatgggcgtgaagtttatttaaaagtggatgtccaacgcaaacagcaggatgggcatatttttgataaacacccagttcaaacggaaacaagcacaataccaagtctgtcgctgctttgatgtgatgaatgcgaccttctcgccatgcccaaatcgaggggctgacatattggacacaaaaaacaccttggggctttaatattttaccgattcgaaggttaaaatcgggtgcatcaataccaataaacagatcaatctgatgcgttttaaacgctgtgatgatttgctttttggcttttaacaaatcaggtaaatgcatcatcacctctgccaaacccatcaccgataagcgtcccatatcaatcactgagcttagcccctgtgctgccattgaccgcccaccgacgccgacccatcgaatatttgggtgtagggcgttcattttctgcataaaatcaccgccaagtgcatctcctgagacttcacctgccacgatgccgatcgtaagtgacgatgtatttgtcataattttctcaatactaatcagtaaatttattaaaagattggctgtattgtcatgccagattcaaatacttgccataaaagtcataaaaataggtcaaaaaattgaccttttaaagatgcgattgatgttaagtaattcggggtaaaataataaacatatattttgtgataacactattttattgttaagtgatcacaatcgcatatacaaccatcacgactggacgacttttttgagtaataccaatactgaaccattgcccccgtctttagcaggtgcagaaacaaacgccatgacctctggcatttggcgtaaccagccattaacgcaggttttaagaatggcatctttacctttgccgtgtacaattttgaccacagtttcaccatgattgatggcttggctgatgagtaataagacagccttgcgtgcgtcatcaatgcttgagccgtgtaaatctaccgcatcataccaccgtagtttgccttgttttaactgctcaaagactttattttgtaaggtgggatttttgtaagataaaaaagcctcacttgccacaggatttaataacgcttgcatatcagacaaaacgcctttaattggctcatcgccttcagctgacgcacggcgacgcaacatattttcatcggtttgggtgggtttggtatggctgacgacagcatcggtttttaacggtatgacgccactcatcgcctgcataaatagcacggtatcatcattgatggcatcatgattaaaacgcttcacttcatgtaaaattgcctttgagctgggcaaattgaccgtctcgttaggtttatcacttgccatttcaggtttggtagaagccttggtcatttgctttaaatcttcttgtagagattttgataacaaatctttaaaacttggattactcataatagtattgctcttatatatgttgttatctgtgattgctgtctttgatgcttgggggttaacacttgttggttttgtgccatcatatatccaaacttaaaaaacagatggcataaaaaccaacaaaaatcaacctattttaaaaaccatcagcgattttgtagatgtgctttcactgttttagcgaaggtgcgtaaggtttcaacggttgcctcccagtccaaacagccatcagtaacggatttaccatattctaaatcatctaaattgacaggaatattttggcgaccacctttcagatggctttcaatcatgagtcccataatagatgaattgccattttggatttggcttgcaacattttggataaccatgggctgaagataggggtctttgccactgttggcatgactggcatcaatcatgattttaccgtttgttttacctttagcaagctcattttcagcggcagcaacagcggtttcatcgtagtttggcttatcattaccaccccgtaggacaacatgagcgtagcggttgcctttggatttgatgatagatacttgaccatcgccagacaatcccaaaaagctatgacctgactgtactgcttgcatggcattgacggcaacagtcatactgccatcggtaccgtttttaaagccaacggggcaagataagccagaactcatttcacgatgtgtttggctttcggttgtgcgtgcaccaatggcagaccagctgattaaatcttgcatgtattgaggcgtattgggatcaagtgcttcggtggcgcaaggcagacccctttcgtttaattcaagcaaaagctttcttgcgatatgtaggcctttttcgatatcaaagctgtcattcatatcagggtcattgattaagcctttccagcctgttgtggtacgaggtttttcaaagtaaacacgcatcacaataaaaagctcatttttaagctcttctgacagtactttaagcagtactttaagtttgtcagcgtattcatgtgctgccacaggatcatggatagagcatggtccaacaacaatcaagattcgcttatcaataccatctaaaatattttgaatggtttttcgtccatttagaacggtatgataagccaactccgacagtggcagctcgctttttaggcaatttggggtaattagcggaatgaatttttcgatattcacgtcatcaatttctttatgttgcgtaatgggattgtgcgtcattgggtggctcataattgctccctgttttattttagatgtgccaataagcttatcaagataagcacaaatcagaac

SEQ ID NO: 24 - DNA, 33248 bp, Moraxella catarrhalis
ggataaagttcgtgaagtacaaaaacaaaaaaacacaaattgatggcattacttttgacagtaaaaaagaagctgaacgctacaaggttctcaaatcaatgcaggctgatgggctaatcaatgatttggaatgtcagccaaaatttatactgatacctagccaatactttgaaactattggcaggcgtgaaagaggcgtcgattatgtcgcagattttcgctacaaagacaatcttgggcaaatcatcgtcgaagatgtcaaaagtgccatcacagccaaagataaagtttatcgaattaagcgtaagatggtgaagtattttcatgatgtggagattgttgaggtatgaatgaattaaaacaaactgaaaatgacgcagtcaatcacccgagtcactacacatcagacccatcaggcattgagtgcatacagattagcgaaaattggtctttttgcttaggaaatgccttaaagtatctttggcgtaacggtaaaaaagatgctgatactgatattcaagacttacagaaagcaatttggtatatacagcgagaaatagagcgaaaaaagagagttaaagggggagcttgatgagcaatgaaaaactagaagcgtacaaaaaagagtttattgagtgggggcgatgggttaggtgcgaccctgacaggctaagttacccaagcccttggtttgagatgataatgcgtgataatattccctgctcatctgttagtccaaatattatagatgacagggcgatagtgattgataaggcggttagcagattatcacggtatagcgtgttgcagtatcagatttttgttttgtactttgctaagaatatccctgaatacaaaattgccaagatggcagatatgcgagtatttagcaatggcaggattaaaaacgcaagaaacattattaaagaaaatctaagtggtgcaatgggctatgtgattgcttttcttgaaaataatgcttgaattgttagcaaagatttgttaatatttacccataatggaaaagtgtgcatatagcatgattttgatataccccttgcagaggcaaggggttttttattgcccaaaaggagggcttatggcaaacaaaaagcccaaaatgggcagaccaagtatttttactgatgaattagccaatgagatttgtgagcgcgtatcactgggtcgcagcttaagaagcgtgtgccttgataaagatatgccagccatgtcaacaattatggactggcttaatcacaatgaagacttttcggagcagtatcgtagagcgtgcgaggatagagaaaccacgcactttgaagagatgctcaccattgctgatgaagtgctaccagagaccgcagaagtggcaagggcaaagttacgcattgatacaagaaaatgggtgcttgctcgcatgaatccaaaaaaatacagcgacaaagtacaagaagataatgcagataatgcagtatcgctaatggctcaatttatgaaagaattgggggaaaaacaagggggataaatgtttgacaagctaaaagaccccttgtatcggctcaatcacttgtactacatcactgataagtcaggtcgaaaggtcaaatttaatatgaccgctgagcagtatgagtactttaaacatgagcacagcaggaatatcattttaaaagcacgacaattaggctttaccacgcaagtgtgtatcatgcagttggattgtgcgttatttgaatcaaaaaaatgtgccttgattgcccacaccctgcacgatgccaaaaggcttttccgtgaaaaggtcaaatttgcttatgataacctgcctgaacttgtcaggcttgccaatcccattaagattgaaaccaaagaagagatggtatttgaaaacggtggcagcattaccgtatcaacatcatttcgtggtggtacattacaaagattacatgtctcagaatttggtaagatttgtgccaaataccctgaaaaggcgcgcgagatcgtcacaggtgcatttgaagctgtacccatgactggctatatcacgcttgaaagtaccgcagaaggcaggcaaggctatttttatgagtttagccaaatcgctgaaaaactgcatttatctaagaaaacattaaccgcccaagattggcggtttttcttttttgcatggtggcagaacaaagagtacgccatgaccactgagcctatcagcgagcgattacaagcctattttgatagcttaaaagcaaagcatggcatacaacttagcgatgaacaaaaggcgtggtatcaagcaaaagaacgcacgctgggcgatgacatgaagcgagaatatccgtcattgccaatagaagcctttgagcagagtattgaaggtgcgtattatgccaagcaatttgcctacttatatgctaacagtcgcattgacaaacttcctgataatgagcatttgcccattgatacttattgggatttgggcgtatcagacagcacgacgatttggttcatcagacaagtaggtgatgaatttcacattgttgattattacgaaaattcaggcgagggattaaatcactatatcaaagtgctaaaagataagggctacaaatacgctaagcatgttgcaccgcatgatattgataatagacagcttggggctgaacgcgctaagactttacgagaacttgcacgagatggctatgagattgatgggcagatataccgattaaattttgatgttgtcccaagaacaagcaatgtcaatgaagacattgaaaaagtacgccaaatcttgcccaaatgtgcctttgatgccatcaaatgcgagcaaggcattaaagcactagaaagctaccgcaaagagtggaatgataaaatgggcgtatggcgtgataaaccattgcacgactgggcaagccatggagctgatgcgtttcgttattttgcaacttatcagacaaaacagcagtatgcaacacaattaaaagtgagtatgtattaatgaaccctgattatatgctgcctgagcttttagagcagatacccaaatggacaatgattgaagattgttatcacggtcaagatgccatcgcaaaaaaaggcgagatttacctaccaaatcctagccccatcaatgaagatgaagtggttaaagtgcagcgatacatggattatcaaaaacgagccgttttttataatgttaccaaacgaaccgccaacgccatggcagggatggtatttgccaaatacccaacccttgacattgacccagcacttgaatttttaaagactgctgttgatgggggtgcattgtcatttgttgggcaagcaaggcaggcatttttgatgatgctgttaaaggggcgtggtggtcttttggtagattatccgcttgtcaaacatggtcagtatctgccaaccaaaaaggatgtcagtgatgataatttacgccccaagatacgcctatttgacccccagagtatcattaattggcgtgtgcagatggtcaataacacacgcaaattgaccttgcttgttttaaaagagaactacattaaacaagatgacggctttaaagtacaaacaggcgaacagcttttggtatatcgcttgattgatgggcaaatttggcacagcatctaccaaaaacaaggcacatggcagcaaatccaaagcgatatcatccgtggtgttcatgaaattccctttgtcttttttggggcaaatgacaatgatgagagcattgatgacgctcctttgtatgatttggcggtgctaaaccttgcccattatcgcaacagtgctgattatgaagaggggaactttatcgcaggacagcccagtttattcattacagggcttaccaaagaatgggtaaccgacattgtcaatcaaggcaatcccatccgcctaggagcgagaacggcgaacattttaggcagtggggcaaatgcgtttttattgcaatctaatgcaaacagtgggctttatgaagccatgcaagataaaaaagagcagatggtggcactgggggcaagactgattgaaccaaaaggtggtataaaaacagcaacccaaagccaaagcgataaagcagatgagacatcaattaccgcccatttagccaataacttatctgatgcttatagccgtgcttttaattattgtggtcagtttttgggcatcaaacacacctgtaccgtggtctttaatactaagtttgataccaataagatgaccgctgatgaaagacgccagctcatcgcagaatggcaagcaggagcaatcacattctctgagatgcgtgcaagactcattgatgatgagattgcctttattgaagatgatgagcttgccaaagcagagattgagagcgatttgggcgagattacaggccacattgatgatgagccatgaaatggtgctaaatgaaaaccttaattaatttagagcgattaaaaaccaaattggcaaatgattttaatgtcacaatcaaagacattttggcatttttgcaaagggtggtttttaataaagagattggcgatttatcgcaaaaagaagtaaatattgtgataaagaaaaccgacagccaattaaaaaccctgtttggggcgtttatcacaaacctaaaaaccgattggcgtgggctatttaatcatcgctatgaggtggacagtccaaagaacatcaaggcattacaaaagtatgccgatgaagtgtttgctaagccgttgcgactagatggcaaaatgggcataacactagatgagctgcttgatgcgttcaccgacacagaacgcaagaaaatcactaacgccatccgccttgctcatcatgacggtctgcccaatgccaaacttgttcaaatgataagggggtctagggctagaaactaccaagatgggattttacaaatcacaacacgccatgccaagaccattgctcacacaggtacagccattgttgcaagccaagccaaacagcaatttattcatgataacaaagacatcatcaaaggcattaaagtcattgcaaccttagatttacgaacaagtggtatttgtaggcatttggacggtgagataatgccgattgataaggcagtttatccgccctatcattacaattgccgtacaagttttgagattgtctatgatggctatcaaacgcccaaacagcgagcgagcatggatggggttgttaaaaaccaaagctattatgaatggctaaaaaatcagcctgcccaatatcaagatgaagtgttgggtaaaacccgagcgaagttatttcgtgatggtggcatgacagtagagcggtttagggcgttacagcttgataagcatttcacccccttaacgcttgaacaaatgagagcattagaacccaaagcctttgataaggcatttgctgctgtggtaaaattagacaataccaaagacagagtacttgctgtggaaagaaccgattggggggggatttgcccaatgtgatgattgcccacgccaaagacactatcacaacacacaaacattatcaaaaagccaaatctggggaattaagctcagcattatttttggttgatgaatatttaacagatgattttgtactaaaattacaccatacaattaaaggttatgataatgtacgtattgtgcctgttcatgccgagaacagctagggcgaaacaaaatccccatggcttatgccttagctctatcagaaatgcttggtgtggatatggatttgggtattgtacaagctaagcgtgcttatcgcacatcatctgatggcgtgggtagactcttaaaacgtgtcagtttgatggtgttgtattaagtggccatcattatatgattgttgatgatgtgattacccaaggtggcacattggcggatttgcgtggctttattgagagcaagggtggcaaagtaattttagccagcaccttgaatggtaaacccaattctgctaaactgcctattaccaaagccacgcttgggcagcttcgcaaacaagcaggcaaagaaattgaacaatggtggcaggagcaatttggctatgatttctcacaatttaccgaatcagaagcaagataccttgcaaaacaaattcatagatatggcattgacgccatcagagatatactctttgcgtcaagaccttaaagatgcttataagcaaggcaaaggcttttttaaggagcgtgctaggcggctgcagagcacttatacaagccaagataaaatccttgcgccaaagcaaagttgatgtttatcatcagatgatgaaaatgcctttgtagtttatttattcacacacagcacccagtagggtgcttttttatcatccgctgtttgtaacagcaaaatcaaaggtagtaaccaatgagcgaaaaaccaaccacagttttaagtgatgacacacaaaaccaaatcacccaagagcagtacaacgagctacaagcagaagttgaacgattgcgtaaacacagcgagacccttttggctgaaaaaaagcaacaaagcgaacagcgaaaggctgagcaggctgaaaaagagcgacttgccgaagagactgcacgcaaaaagggggattttgagacgctagaaaagcagtatcaagccaaaatccaagagttaaacgagcaaatcgctaagcgtgataaagagcgtgatgagaatttggtcaaatcacacgcccaaaagctatcaagtcagttaagcgataaccctgccaaccaagagattttacaaatactcattgaaaagcgtttgtctgccaaagatggtcagctaagcgtgttagatgacagtggtgctgtatctatcatgacccttgacgatttggcaaaacaaatccaaaactgtggtaaatacgacagcttaatcattggcacaaaatcctgtggtacaggttcaaacggtcaattaattaagcgagcaggtgattacagtgaacaagagcgattagcacttgccaactcaaaccctgctttatttaatcaattatttttggagtaatcatggcaaaattaagagagatttttaataaaaatgtcaccttgtcttatcaggttaaagacaacttacagcggtcaaagttttggcaatcaggggcatttgtctcagatgcacgcttacgccccttgctaaacagcggttcattaacctttgatgtgccttttatccaccccattgatggcaacttagaagccaactattccaacaccatcatgacagatattgcgatgccacgctcaatcgaaggcagcaaatcaaaagggcgtttggcggtattaaatgagggctttattgaaagccgtcttgaaagctacttgacgggtcaatcaccgctaaaacttatggcacagatgattgatgattattggcttgcacaagctgaaaaccgtgccattgctaccttgtttggtcttttaaattatgaccaatctaatggtaagaagttatctactgacatatcaaaggcaactgctgatgattcatcaggctttgatgttcatgcgtttattgatgctgagggcacgatggatgaaatgtatcagggcaaaggtttgatggttgtgcatcctttgattgcaaccaagatgagaaaacagcgactacttgagagagtaaccaccgctgatgatttaaagccgattgaaacttataacggtcgcaggcttatccagtcaaagcgtgccacggtcataggcacaggcaaaaacgccaaatatgtctcttatttgttaggggctggggcatttgctgctgatatggttgcagggcatgatgatttggagcttgaacgcacagcgaacacaggcaacggctcaggtcataccacgctatggacacgccgtaacatgcttatccacccccaagggtttagcttcatcggtgagcctagtacgctaacaggtggcacaaaaaatgaagcgctgtcagcgagttggacagacttaaccacagcggcaaactggcgattggacgctgatgctgatgctacccccattcgctttttaatcaccaacctataaggagaaattcatgtcattaccaaaagataaggttaagcctgcttttaattttacctatccatcagagcgagcgtattttgatgaaagcaaaagcacactggctaacgcacaggtaacagaccctgccaaaagtggggcagactacggcatcaaagacccacaggtcaccgaagcactgacaggtacaaagagcgagaccgctaaggttgaataacagccaaacagcacgaacaaaagccccatctgttttaggtggggtttttaggatgaaacaatgataacacttgatgatttaacagacattgataaggctgatgaacaaaccgtggttattgtcaatgcgtggctaaataagcataagttaataccatttaaaaccataccagagccgataaagcaggcaggcagatacattgccaaagcgtggcttgatggggatttgtttgccacacgcaccgaaggacaggtcatctcaaagtcatcaaaggcaggtgatgtgtctgtttcaaaaacctatgcagatggacagatggggcaggctatgagccaaaacgagcaaatcgctttagcacttattgagccgtatttacaacagcctttgggaatgtttggcttgcctttggttagggtgtgaaatggggttaaaagctgaaattagtactgaaattacccaagcctttgatactgatttaaaagatgctgtcaaagacttcacaggcaggcgtgtcatcttatctgatgatgattgggcggttaatgatacccaagtactatctaccatcaattacagcggtaggggcgtttttacaggcttttacgcccatgagattgataacaagaccatcatgcaaagcgatgttaagctgatttgcttacaagatgagctgacagagataccacagattgatgatgagattaacgagatgaaaatcatcagtatcagtcatgatcctgctgaggtgagctttacaattcagctaaggggcttttaatgggcattaaatggaataaaaagcttagcattgaacccattgctgataagattgacgccacttatcgcaaatttgccattgactgctataacaatgtcatcgccctaagtcctgtgcgtaaagggcgttacaaaaatgcccatcatatcagcattggcagtcctagctatgccgagacaggcggtggcattgaacttgtcttaggtctgccaaaacacacctacccactcatctacattcaaaacaacctgccctatgcgttgcgacttgaacacggctggtcacaacaagccccaacaggggtgtacggtaatgcctttaacagtgccatcgccaatttgggttaatcaagctgtctttgatatgcacgcacagcatccatgatgagctgattttggggaatatttaagcgtttggataaggatttgatgagttctatgtcatcaagttttagggtgaatgctttgttttttaccccacggcgtgcgttgctctctttttgaatttggggtttgggttttaggggtgcttgtgattttgggcatggtacttgaccttttttaaaaaatgccttatgataatgggtaaggagtggctaggcgtttccacctaacctgccttggcgactgccatcgctttaggctttatctgttagtaagctggatagcttagcagtaacagaacgatgatgataaacaccttagcaagagttttcatcgtttactccttgtttttggcgtaagcgttggtttacgccttaccaatcaagcagaccttgcttgatgtgttgtattatagcctagcttatttaaaaagtcaaataattattacggttttgtatgaaattgttatgattatttggcttttttatcccattttaaaaaaggagttgttatgataaaagctccatacaacccaatcgatgtcgccaactatattgtggctgaagctattaggagagaaaagcccgttactcacttaaaactacaaaaactgttgtattatgtggtggcgaagtatttgcaaacccacaataaaccattaattgctgaaaatgtggttaaatggcaatatggtcctgtggttaaaagtgtctatcatcagtttaagatactcggctcgcttgagattacagagctttgtgagtatatagaatcaaaagatgataagaagcttttttctgtaaaatgggcgaatgttgatgcaaatgtgaaaacattagaaaacgaccctgagtttgcaaaagttgctaatactgtaattgatgatttgctaagcgtgtctgcttttggacttgtggatataacacacgctgaagccgcttggcgtaatttcgagcctgaaatcttacaggggtttgaaccttattactctgaagatgagttaaaggctgcaacttatggctaacaatgagtcaattgctgaacaaaaatccgactaaaattggttttttatatttaaaatgaaccgcttatcatcagataggcggtttttttagggtagttttatcaaacaggacaaccatgacactcactgaacacaccaaacgcttaatccacgcccatgccaaaatctgctatcctgctgaatgctgtgggcttatcatagatgggcagtattatccttgtgataatatcaccccaaatccttatgagcattttgagatagaccaccttgacatggttgaaatgcaggaatatcacggcgaaatacaagccatcgttcacagccaccctgacggcaatgctgagccgtccgaagtggatagggtgcaaatgagcatacatgggctagattgggtgatttgtgcttttggttaccacgctgatggcaaagagtactttgatgtcaaacgccataagcccaaagcgtatcaagccccattattagggcgtgagtatcatcatggcgtgcaagactgttatagcttggtgcgtgattattacagccgtgagcttgatattcacctgcctgattttcaccgaactgatggttggtgggaaaaagaacaccacttacccttatatgaaaataacttcaccaaagcaggttttatcaagatgcaagatgaaaccgacttacaaaagcacgatgtcatcttgtgccgtgttgggcgtacccatcatgtcaatcatgctttgatttatgtgggcgatggcaagttaaaaagcgaaaccacacctgattgtgtgggtaatgccctaattttgcaccatccccatggcagtcttagcgtgcgtgagatttatggcaaggggtgggcagataggacggcaatggtggttaggcatcaagcatcaaaccaaaccaacttgtaactgcttacccaatttggcaaaagcattggcaagggtgtcaattttggtggtgtgcgataaatccacaaggcgagttagactttgtggcacaatgcccattcttctggcaagctcagcttggctgacattttgggcaatcatttcgttaagcagtaacacctttacccatacagacggtggcaagctaaccaaatgctcgccatcttgtgcttagcttggcattggtacggctcggttatcttcaaaataaaactccatggcgaccattaaggcatcttgtgccatgtctagggcttcgtccgtggtatcgccttggctgatggcttctggaatgtcacgaaaagtaacgcaaaagccgtctgtatcaggggttagggtaacaggatagtgcataaattctctgcctttgtggttaaagcaattacacctgacgaaattagggcagcaggtgagcaatttaaatcccaccctgaaaacaatgcaccagccaccgcagataagctgattgccaataaaagcggttttgttttatctgagcgtagtcttaaaaatctacagatgattattgcccccttgccaaagcaatggcacaggcaagcggtaagctgggcgtaaatgtgcgttggggcggtgcatggatggtcattacaggcaaagcaggcacgccacaagaatgggttaaggcatatcgtgctggcggttgacgctttttggatggggtacattttgagctggtgtaagcagaattaaccctttatattctaagcattcacttgcccaattaacaaacgctttatacattgataagcttgagccgtgcgtgttttgagcgttttattttcgtttcacacccaattttcgacaaattcagggcttaaattgcctaatggtttatgccaaatattagccaagcatccctcttgatactcaccatcagataaataaggcttgcacgcttcaatatggtctttaatatagcgagccgaccagtcggattttttcaaatcaatttttcacttctattaaatttaaactgatttgttcactaatcttaaccgccaaaacgccacccccaaacaaagcaccgccacacttgccaaatatgccatcttttgccaaacatcttgaatggatacgcccatctgattgagctgaacgaacatttgtacgccttgtgtggttggcagggcattggctaatggttgtaaaaatttgggcatcgccatcagtggataagcaagccctgttagcataaataatggcacagagctaaaaatgagcaacacacccaccttagcaccatcagctacccatgatgcgattaataaagccaccccaatggcacagctgacaaagatggggacaccgagcatcatcccccaaaagttaccacccctaggataatcatgccaccaaaatacaaaaccaaataaataaaaacacgacaaacagccaatggtcaatgccaccgcataaattgccaaaaaatcacaagcactggcacgccataacctttgacgataacctgccacaagcatggcaagacccagcacgatggtttggtagacgatgatgggagcaacagcaggaaaaatatagctaccatatcctgacagagggttaaataatgctgattgatggataagctccggcatgggtttgtgtctggtttgggtgacttgtcctaactcttggatgatggttgcgtgtagtgatgataccagacctgcaccgatattttgtgtacgcaaaaaatacgccgaactcagatacagcccaaccccgcctgtttgaccgtgatgaatgctttggttaagattgtcaggcagtaataaaatcccatctgcctttgctgattgtaccagcatttgagcttgcctaaaatcactcacaaccgccaaaacatgtatgttgggcgtgtggcttgtggtgtggatgatggcttgggtgagcgggctttgctcttcatcaacaatcacaatgggcaaatcggcaggacgctgagcttgataggcaaacggataaaaaaaaccataaaacaccaccgacagcaccatggtcaaaaaaatagacctgtctttgatgatatccagccagatggtcagatattgtttgataaatcgtctcatcaactgtcatccttggatgaatttggtgtggctattaaggtcttgttgatgcgtctaagcagtaataggctaccgatgccaaaaatcagcacaaatatcagcaaagagttaaggtgtgctagcgtgatgataaatggactgccaatcacccactgttcaacttgtagacgggcaaagggggtaaaggggataatctgcgaccaaaattgggtaaagcttggggcgttatttagcggcagagtaacccctgcaaaactcattgatgagccgccatagaccgccaaaatgccatagcttttattaatgttttgggttttaagtaccaccatcgccccaaataaggcataagcaagataaaacagcagctgaccgataatcagtacaaataacgaccctgccacaaaccagccacgcaccccaataagccacgcctgccatagcccatgccaaaggctgattatcagcacatacacgcttattttaccaaacaacgccccaaaaggtgaatgatataaccattcatgtacgctgttttcatgaaattcttgtccaatggcatgggcaaccaaacagcacagtaataaatgcagcaccgcagcgaccaaaaacggctctaaaaagaattcatagcttaaattggggttaaacagcaccgatattttgacatgaggcatgttgccaggcaaatggggcaatacaccagttaaatgtttggtttgtataaatttggcaataccgcctttggtgcttttagatagggcagatgagatggcactgccaatgctaaaaaatgattgattgtaggcaatgtgaatgcctgtattttcaccacgcaccaaatgattttgagcatccttgggaatgtgtatgtagccaccaacatccagacgattgatggcatgatgagcatcttgtacattatctaagattaggacggttttaatggtttcattatgatgaatgtgctgataaatcaaatggcttaattcactgttatcctcatcaaccaaagccacaggcagatgatgtgctttaccatgataaaacatggctccaaataagacaatgatgacaagcggtgctatcatgaccatcgccaaatcaaatcggttacatgataagcggttaagctcacgcaaaaatgcttggcaaaaagcacgaataaagcgaacaatcatggatatcagacttatttggatgaaaatttaaggcaaaacagtgatatcaaatatcacactcatgcccacttttaacccttcaatgggggtgatgggttcaagtttggttttaaagctatgaatgtcataaccgcctgtctgtctagtatttttgatggtggcaaactctccctcatcatcggtatgcacgattttaaaatcggcggttttgttcagtgcagggataaaaccagttagcttgggcagggcatggacatgactgtactgattttcttggatgcttatggtaatggtagggtggttgtcaagcaggctcattacaggcaccgctggcatgaccagttcactgctttgaatgtagatttttgagaccgtgccatcaatgggggcataaagcatggtttcagcatctagggcatcggcttcggcaaccgccgcacgagcgatttggacttgggcgtcggcggacgattttaattcatcagtgcgaccacgctgggcttttagatactgctgctgtgctgcatgggcaatttgggcagaagactgcttcgctgccctcatctcatcacggcgttggcgggagatgacgccttcttgatacaaatactcaccacggcgatagctctcctctgccagcgttgcctgagctttggcactttgccaattggcgtacagggtgtctacattttcttgtcttgtgccacggtctgtggacgactgaaaggcaagggctgactgtaacatggcagcggcttgctgttttttggcgtcaatttcaggactgataagctgaaccaaaggttcgcctgccctgacagcttgaccctctttgacataaatggcagcaacacgactgggcagtttggtgctgatgttcaccgtttcgccctccacacgcccttgaatgctaaatgtggcaggtccggtaatcttttgtctgagatgggcaatcaccccctttggcggctcatttgtgctaccaatggcgttagctgttggcaagttttgcggtgtgccatagctttgtatcaaaccaaaaataatcaccaaaagcacactgccaatgagtgccaataataagaataacgccaaaggtctgggctttgatttggcttgtgtgtggggtttttgtttttttgggtggttgccatcggtatctggcttaacatcgtcggtcttatcggtcatggttttgggctgtcaaatggttggggttaagtatgagcgttatcaatcacagtttatgagcatcatccaaagacaaataatcatcaaagtcatcaattgtccctgtgtaatgcaacagcgtcgccagtgccaaaaggtagcgatacgcatttagagcggtttcgctgtcaatctgtgataaagcactttgggcatcaaccacacctgccaccgtcccaaacccttcttgaaaagacagcgtctggatacgcaaattttctttggcggcttgacgattttgttgtagtagggcgtgggttttttgtgccagcaccatctcgccataagcggtgtgcatggtggttgtgatgtgttcattgacttgttcatgacccaattgggctgcttgtttttgtaggtgtgctgccccaatctgcttatcacggtcaatgcccaagaataggttgtaagaaaccgccacacctgcaaaccaatcaggcttatcatctaaggtataacgagccacagcggcaatttttggttttttggtggattgtcttagggcgatattttcatcggcaagcaaaatgtcggtttttagcttttgatttaatggtgtattttgggagtctttgagtaatgcttgccaattggggcgatgctgggtgttgataaacagcggtgtgcttagcggttcaatgtggggcaaaccaagcaaaacagcaagttcataaatgctgttttggtgctgattttgggtgctttgatacagtctttgtacctgattgcgtgccacttcaaattgcatacgctgtccacgactgataaaaccttgctgttctaatttataagcattatctacatgtaactgcatggcactaagcatgttttgttgtgtgtcggtcagctgcttttgtaattgcacattaaaataatggcgaatcaaattaagttttgccaaagagatgcgttcttgtaatccaaatttaccacgctgtgcttgtagattggcgatatttttggtgctgctgattaagccacctgtatagatgggtatcgtggcggtaatgtttggggtaatgccatcatggcgtaacttgacatcttgatggtcaggcaggcggtcaagggcggtttgggtgctgttgtgcaaagcatccaacagaccatcgggggcactgccaaagcgatggtcaaaatgggtgttaatgtgctgggcggtctgctctttgatatgatctaagggtatgctgctgttttgttgcagtacaaaggcgtgtgcattgagcgatatcctaggatagtgtaatttttgtaatgattctgcttgtaagacatcagcttgatacaaggcatgacttgcttggatggcagggctgctgctcatgagctgtttttgggcatcaagcaagctataatcagcatcagcctgctgtactaacaataatcccaaaagcaaaaaatagggcattttcatggttgaaaaataaacaaaatttaaaatcttatcataacaaggcttgataatattatcaatagcaaccaactggcatttgatggacatgtgtatcaaatttaatgattgattttttgggtaaattatgtatgcattttatcattaaaatatctttatcaattaatatttaatgataaaattattaaatttaaatatgacaaagtgaaatattaacaatgaattgttatttggtttacttatatcatttaacataatatatattatgcgaagtagtaaataagtagataataagcaatcaagccaaaaaacagattggtttttggcttgattttggcagcggctcgcagtttattgagtggtcagatttgcccatagtgtttcaagacgcttggcagaaactggctgagctgttttcatcggttgggcaaataaattaatgcggtattcttcgaccagccagcgatattctgcaaacttaggatttttaacgcaccttgctaagcgttccatgtgcgtatctagcaaatatacagcatccaagtccgcctctaaattatgctgtagcctatcaaggcgaatattgagtgcctgtaaataacgaggatactgacgccaatgccgataatccgtctgatatacaaaatttgccaattgcaagtcatcaagctgatcttcgatgtcttcgatattttcaccgaaaatctcctgatctagcatcaaaagcttgccacgagctgtttgccaagcggtataaatttcttttaagtttcttaagatttcttgaccaaccagtaaaaaattctttaaaattaagtcttgacaatcgtcaaactctcgttcatctagtggcaaatgtgaaatcagccattgattattttgtgttattagacctgcaattgctgctctggcatgatcaacgtgttgactgacaggcttatgatcaaagtctggaccgtagtcataaaggcaggcttctaaagttgcatgtacgacgatattttttagtttttctaaatcacctaatggtgcgaacgccaatttaaatgctttatcaatttgaccagtcagctgtttttgtttcgcacccaaatgccccttaatgagcgttaaaacgccctttttatgctcagccaaagcagcgttcatctctgtaaatgtcgcaataaaaaccgcactttgggccgcatctgcttttagtgcagaaaattcttgcatgacaatgcctgatgtgtgcttatttttgacaaaattaaaatgatttggaaaatgatgatgcaccccctgctcaatagcgatgctttgaacgctggttttacgatgtcgtgcctgtaatttcggtaagtcacgacttttttcgatcacacgatttttatcatccaccacacaaatcaatggacgcaggtaatcttcaaccttatcaggtgcaaaatcttgagcgtgtgcttgcacaccaagcgtctttaatgctgccacaagctgatctaataaacccatctttgagcttgcgtccaattggtgaaaaatcttttggcaagtatctggaatggggacaatctgtcggcgaatttctttaggcaatgtttttaataattgtagtactaattcataacgccaccctgagataccccaaagcagtgtcacaggatcaacctgtgccaatgccttaatcggtacatgcacggtcacgccatcattatcagccgctggatcaaatacatacgacagcggtaggcgtacaccgcccaaatgccaactttcaggaaattctcgactatcatcaacagcttcattaagcacatcttcatcactaaaatgcaaaaagttgggtgttttgttttcagcatcgtgataaaattcttcaaaacttttacggctggcgatatgattaggaattttggcatcataaaattgatataaactttcttcatcaaccaataaatctcggcgtctaagcttgtcttcaatacgctcaatgtctttgattttattggcattatctgccaaaaatttcatctgcatcccatattgattggcaaccaaagcatcacgaataaaaatctctctggcctgtaccaaatcaatttgttcaaaattcaccaattctttggcaatcacaatcagtccaaataaactgatttgagcataagcacgcacacgccctgctttttttgaccaatgcggttcaaaataatgatattttaataaattcggtgctgctttgataatccattcaggttcaatcttagcaagcgtacgcatataaacttgcgaggtttccaccacctcaaacgccatgacccactgagcaccctttttatgaagcgtactggcaggaaaaatacgggctttttggctacgagccatcaaatattcgcccaccgtatcggttttatgcgccacaaatgacaaaagtgcactcaaaagtgcacgatgaatattggcataatgaatgcttgttttgttatcaatgtcattttttagggctttggcacccacgagtgcttgtttgatggatttttgatgagaggtaccagacttaagtgataatcgaacgccctttttggtatcaattttcacatcattttggtgatttttttgtttattaatctcaaaacccatctctgccatcatctcactaagctgcctgtgagttttttgccattcacggatgcgtgcgtagcttagataatgttttttggcaaaattgcggcgagcattactgctaagtgcttgattgtcattggttgaatgccgatcaaacagtgctgcaaacaattctaaataaaataaaaaatctgaatcttctttacgaaataacgcatgcttttgatcggcttgagcgtgcttattgattgggcgttcacgcacatcttgaaccgccagcgctgacacgatgattaaaatatccgccaagcaatcaaaggcatcacctgccacaagcatgcgagccaagcgtggatcgatgggcatttttgccatttgttgtccgattttagttagactgctaagctgtgtgcgtccctttttggcgcgtgttttggtaaaacttttatcatcaagtgctcccaattctatcaaaagcttacggccatcattcaccaatcgtaagtcaggcggtgtgataaagtcaaaggcattcacatcgccaagttgaagacgctccatctgtaaaatcactgatgctaaattggtgcgtaggatttcaggttcggtaaattctggacgactgttaaaatcttcttcagaatacaaccgaatacacaccccaggtgctaccctaccgcaccgcccttttctttgattggcggcggcttgactgattgcctcgatgggcagtctttggatgcgtgatcgatagttatagcgagaaattctggcaaaacccaaatcaatcacatagcgaatattaggcactgtcaacgcagtttctgcgacatttgtggcgatgatgatacgtcgccctttacctgacggtgcaaagattttttgctgctcaccatagctttggcgtgcaaataacggcaaaatctctgtatgggcaggcgcatataacatcagcacttcttgtagctcacggatttcagcttctgttgccgcaaaaattaagatatctgcctgatctggatgccccttggtgcgtgcatcttcaaagcattcattaaccgctgctgtcaaagcgcgtggcagattgtcctcaatatcatcaaatgcatcatcatcttggctagatacgatggtatcggtcaaggggtgatagcgcacctcaacaggatagctacgaccctcgacaatatacacaggtgcaggtttgccattcgctgcaaaatagtcagaaaacctttgggtgtctaaagtggcggaggtgatgataacttttagatcagggcgtttgggtaaaagacgctttaaatagcccatgataaaatcaatatttaagctacgctcatgtgcttcatcaatgatgatggtatcataatttgccaaaaacttatcagagcccaattcagcaagtaaaatcccatctgtcatcagcttgacaatagagtgcttgccaccttcttcggtgaagcgaatcttaaaactcaccgtctgaccaagtggctcgccaagctcttcagcgatacgcatcgctaccgagcgtgcagccaatcggcgtggctgtgtgtggccaatttgacctgtgatgccacgccctgccatcatagcaagcttaggcagttgcgtggttttgccagaacccgtctcacctgcgataatcaccacttgatgatcacggatcgcttgaattagcgtatcggcttcagcagtcacgggcaaatcatgattaagtttttctgatagattttttggtatgctatccatacgattggcgacctgttcggcagatcgctcatagatagcatcatagcgtattttgcacttagtttttagatcgcctgtggtagaattcattttctgttttagtttatttaaataatgtctgtctttggcaaggactggtaaattatcggtagaatgcatatttttaaatgatagttatcttataaagggtatgaaaaagcatcaatttaagtacattgatacatcagattttattttattcatgggtctatatgagggcttggacgcatgaataaaccatgtattgtaaataaaatcatcaaaacctgcaattttctatttaaatggcgattttagggcgatagacaagcgatgactttttgcccatctgtcgcaaatttattaacttatgctataatgccaagtatctttttttgcctattgtgattgtcaattatgaacgaatccattagcctaatctcgctggtcattgaagcaagcgttgttgttaaattggtcatggcgatactgcttttgctgtctacaatcagttgggtactgatttttcatctgggtaccaaaattggcggtattgccaagtttgataagcgatttgagcgatggttttggactgatgatatcgatcatcagctgtctgttgtgcaagcagaatcagagcgtgcagggcttgagctgattttttatacaggtttttatgatcaaaatcaccaagaccaagattcttcactaagtgatgataaaaaagtgcaaatcgttgagcgtcgcttgcgtatggcattaggcagtgagcaggtgcatcttgaaaaaggattatcaacgcttgcaacgattggttctgtttcaccttatatcggactatttggtacagtatggggcattatgaatgcatttattggcttgggtcaagccgaatcggttggtcttgcaaccgttgcaccgagcattgctgaggcattgattgcaacagcacttggtttatttgcggccattcctgcgacgatggcatataatcactttgccaccaaatccaatacactgtatgaaaatcgtagcctattttgtgaaggcttaataagtgcattggtgacaaatctggcaaaaaagaacaccgcatcaactttatagagcatactattttatagagcatattatggtaacttccaatcgattcgctcgtcgccaaagaccgctaaatagtgacatgaatgttgtgccttacattgatgtgatgttggtgcttttggtgatatttatcgtaacagcaccaatgcttgctacaggtattgaggtatcactgccaaaagagcagaccaaacccatcacacaagctgacaagctgcctgtcattgtcagcattcaggcagatggcaatctgtatgtcagccataaaaatgccatcgatgtgccaatcacgcctgacaagctagataccctgctacgccagatgcaccaagacaataccgatttacaagtgatggtcaatgccgatgcagataatgcctacagccgaattatgcagattatggcattgattcaaaatgttggtatcacccaagtgagtttgcttagcgaatctgttcaataatgcatgataattcataaggcaaatcaatcgatgcgtttatccgataatcatccaacagtcaattttgataaatctgcgctaattttaccaattttagccagtgttttattacataccgtcatcatcatagcggtagcagcaccactgattacaccgcctactaagcctaatactactattcagaccgctttggtaggtcaagaggcttttaatcgtgccaagacggccttgagcaatcatcatgccaatcaaaacaagccaactgccaccaacacttcaagtaccatcactgccaatgataatgataatgcatttatgcaagctcaaaatcagcatcgttatcacccacaggtttctacttctgccaccacgacccaagcgtatcatccaccacccaactcagcaccctttgaatcaaattcaccaaatatacaaaatcaaccaacaaacgctcacgccaagctggctgaatattctaatcatgtctcagaccttgagcagtcaaatcataccgagtctacgccaagccgagcacaaatcaatgccgccatcacctcggtcaaacatcgtattgaagccatttggcaacgctatcctaagcagcccaatcaaaccatcacctttcaggttaatatgaatcaacaaggcgatgtgacctcaatccaattcggtggtggccatcctgatttgcgtgaatctgtagaagcggcggtatatgctgccgcaccattttatgaacttggcggtatgcgtgacagtatccgcctgcagttcaccacagagcagctaattatggataataaccaaacaaccaatgagcctaatcactaatcgccatggagtttttatgaaatcacccattaccaaagtttgccttgctctgaccataagcttttctgccgctttgacgcacacttatgctgatgatgaattgattgtgattagcgaacaagttgctccgagtcaataccccgtggcagtcatgcctttttcagaagctcatcaaatgagtcattatctaagcctggcaggtcttggtactactcaccaaaacctgccacagcacactcagacgaatagcgacattctgaataatctgaccgcatggcgtaaccgaggatttgaatatattattttggcacagtcgcatcaaattttgggaaataagcttgcaattaactatgaaattattgatactgccaatggtttggtaagcgtcaagcatacccaaattagcgataaccaccctgcttctatccaagctgcctatcgtcaaatcagcgatacaatctatcaaatcatcacaggccagccatcagatttgatgggtaaaatcgcctatgtggaagaaagcggatcgccacaaaataaaatctcatctcttaaattgattgatccaagcggtcagcttatccgtacgctagataccgtcaatggatcaattataacgccgacattttcccccgatggcttgagtattgcttatagtgtacaaacaaaaaataatctgcccatcatttatattgtgtctgtatcaggtggcacaccaaagctcgtcacgccattttggggtcataatttggcaccaagtttttcaccagatggtagcagtatcttattttcaggtagccacgagaataataacccgaacatttatcgtcttaatttacataccaatcacttagatacgctcactacattcaacggtgctgagaatgcaccaaattatttggcagatgcgtcaggatttatttatactgctgataaaggtacacgccgccaaagcctatatcgctatgattttggcacgacgcatagcacccaaatcgcctcttatgccaccaatccacgcttaagcccagatggatcaaagcttgtatatttatcaggtggacaaatcatcatcgccaataccaaaggccgtatccaacaaagttttagggtgttaggcactgatgtatcagccagcttttcaccatcaggcacacggattatatatacatccaaccaaggcaataaaaaccagctgatgatccgttcgctatcaagtaatgccatacgcaccatcccaacatcaggcacggtgcgtgatccgatttggtcaaaataatgccaatgagtatcccaactaaggcgacagtcggctatacccaaaggcggttatttatggtcagtatgacagttggcctgatcagcttgagtgggtgtcagcacattcaagtgaccaaaagcccaataccgatcatcatccatagccatacaaaatcgccatctcagcctaaacctacaccaactgacgccgtgcctaccaaaaaccgcccaatctccccaccaacacaaaagtccaatacgatatttattttggaagattggttttaggcagttttggtagattcaaaatatagtaacagctcattcaccttgtcaattctagcttgggtatccataagctcttggctggtgtatcggatggccgttgcaccattcatgcgataaccgtcattggactgaatcagcttaataatcgccaatccatcaatcggcgtatcggcacgaaactcaatactgatggtggtttgggttgcatcaatcttagtaatccctaaggctttggctcgtatgcgaatgcgatgcaccgcaaataaattttgggtttgggtgggtaatgtgccaaatctgtcaatcatctcagtacgaatgtctatgagctgattgacatcatccaagctactgattcttttataaaataccaaacgctcatgcacatcacccaaatactcatcaggtatcagtgccgatgcatgaatatcaatatcactaaccaaatccagtggtgtggcaagactcggtgtcttgccttgtttgatggcattggtcgcacgctcaagcatatccatatataagccaaaaccaatggtttgcatgttaccagattgctctttgcctaaaatttccccagcaccacgaatttccaaatcttcactggcaagcataaaccctgcacccaaagtgttggctctggtgatggcatttaggcgttttttggcatcgcttgataatcctttcaatgatggcaccatcagatagcagtatgcttgatgatggctacgacccacacgaccacgcaactggtgcaactgagcgataccaaatttatccgctcggtgaataatgatggtattggcattaggcacatcgatacctgtctcgatgatggtgctagcaaccaaaacattaaactttttatgataaaaatcattcatcaccaccgaaagctcacgctcattcatctgcccatgtgctaccgctactcgtgcttcaccgaccaattcacgcagtgtgtcagctgccgcctcgatactagcaacatcattatgtagataatatacctgtccgcccctgagtatctcccgtaaaattgcttctttgattgtctcatcagatttgggtaataaaaaagtcttaatcgccaagcgtctggcaggtggtgtggcaatgatagaaatatcctgcatgcccgataacgccatatttaaggtgcgtggaatcggggtggcagtcattgataaactgtcaatattggtttgtagtgctttaatacgctctttatgccgtacgccaaaacgatgttcctcatcaataatcatcaaaccaagctgtttgaatttaacatcgtcctgaatgagcttatgcgtaccaatcacaatatccaccgtaccatctgccagccctgctaaaatggcatcttgatgttttttattgccaaatcgtgataaactttcaatcttaatgggccaatcagcaaagcgatttaaaaagctgtcctcgtgctgccctgccaaaagcgtcgttggaacaagtacggcaacttgatagcccgcctgaacagcaatgaatgccgcacgcatcgccacttcggtcttgccaaagccaacatcaccacagataagcctatccatcggtttactttgcttcatatcgtgcatcacggcatggatagcttcagcttggtcgatggtttcttcaaaagcaaattggctggcaaatagctcatattgagacatatcaatatcaaaactgatgcctgatttagcatttctacgagcctgtacatttaaaagctcggcggcaacatcatggatttgttccaaagcttttagcttggctttttcccatttgcccgaaccaattttagacaggctgactgtctgcaaatctgagccgctatatcgcccaatcagtgccaaattggtaataggtacataaatactggcatcatcggcatattttagatgaataaattcttgctcaccttcacccacatccagcaccaccaaaccttgataacgcccgatgccatgttcaagatgaaccaccaacgccccttcggtcaactcagttaccgacttaatcaaaaaagcctgtgaaacacttgattgacgacgacggcgtgtttgaagcacctgcctaccaaaaatttgtgtctctgagatgatgcataatccgccagtttcatcacgcaaccaaagaccacgctcaatcggtgcaacactcaaagcaatacaatcagtcttaaaatcatctaaattattaataaattcttgataattatcaaccactttgacagcgactttatcttttaatagctcaagaataatttcacggcgaccagcactttcagcgaccaataaaatcggtacttgccctgattttatgaatgatagcagttctgataaaggcttggcagcttgatgattaatcggcaaaatcggcggcggtaaactctccatggcaccaatttttgccgtatcgttgtttgtgttgataacaactctgggataggctttcaatacttgatgaaattcattattcgccaaaaataaataatcaggcggcataatcggcaatgatttatcatgtgcacgagaatgatggcgtgcttggatttgctgataatactcatcatgacaagcactaagattatcatgactaaccaccagtgtatcatcgggcaaatagctaaataaattgcctgttttcatccatgcgtcaagctcaaaaaataacggtgcataaaactcaattccctgaggagcaatggctgccatgacatcattataaaattctatcttgcgggcgctggcattaggaaacaggctcgcaaaattttggcgaaacatctctttgcctgcttccaagggaaattctctagcaggcagcaggcgaaattcggtgattttggcagatgatggcagcttttgggcatgatgcgtattcatgcctgcttgggcatctttttttagctgagctaaatcattatcggataaagtacgctgactgtcaggatcaaaaaatttgatcgtctcaatgttatcatcaaacaaatcaagacgaaaaggtaggctttgaccaacggcaaaaatatcaacaatactgcctcgaaccgcaaattctcctggctcaaacacattctccgtctgcacatagcctgctttggttaatcgaagtcgctgttcatgaatatcaaatttatcaccgacagccaaatcaaaatgctgtcctatcagccagcttggtggtgcgatacgttgcatcaatgtctgagtactgaccaataagacaccagttgttggcattctcgttagtaaagcaatacgctctgagataatgtcttgatgaacagacagctgatcataagccaaaatctcccaatctggaaaaacatgtgcatcaatgccaaaaaaagacagctcagtatccaactgattcagttcattttgatgattggcgatcatcacaatcagccgctcttcacttttggctgccagtgcaagccaaaaactcaaatcagcaccgccaagtaagggtaaagttgtcttaaaatttgccttggttggcaaatctaatttgggcttaaatgtatcaatcatcgtattaccaagtgttaagtttttgttgccacgctaagcatttatctgcaatggtatcaaccgaatgccccataatatcagctgtcacagcaatataatcgatggctgcaccgtttaacttatctcgaagctgatggatattttcaagggtgataccaccaatcacgcataaaggaaaatcaagttcgcaggctttttttaatatgtcttttgagataattttggcgcgtggcttagtgatggatgcaaatgctgtacccatagcaccgtaagttgccccttctcgcttagcttctttaaataaagcaaggtctgtatgacaggtgcgaccaatcaccacatggtctcccaaaatctctctggcgacccgtacgctaccatcacgctgacccaaatgaagccccgtcccaaaatgtgatgcaagctctagactatcattcataacgactttaatatcataatcattcgcaagactgacgatcatttcagcttctcgatacactgtcgccaaatcataaagtttcaaggtggacttacgacgcacttgcagtaatgacaccgcacctgtatcaaacacccgttcaagcttatctaataaagttgtcagctcatcatcattcgtcagtaagtataatttgggtactttgtcaatactttgtaaagtcatttactgtattccaattaatgatctgatttgatcagcgatacggtcaaaataatgtttatcaggtgattgaacatggttaatacttaaataggccgcacaagcagcctatttcaaaccatgaacattcatgctaataacatcctcaaccacctatcaaacatccattttccaatcaaatggcatctgatgatgaccacgcaatgccatcatcagcgtttgctgcatgtggctgagtacctcttgggtatatggcatcgcttcatgaccccaaactggatttggccatgcggcatcattttggtagcgtacgatgtgatgaaaatgtagctgtgatacctgattgcccaaagcggcaacattcatcttatctgcaccaaaaatttttgccatttggctagatacccagcttgactcacgcaaaaattgcacttggtcagccgctgacagctcatagatttctttaatgcctgaaacacgaggtaccaaaattagccaaggaaattggcaatcattcatcaaacgcacggtcgataatgggaaatcaccaaccaaaaaggtatctttggccagcgtgggatgtaattgaaacatagttcgctcatattgttgttataaatagtgatattgtagcataaatttagatggcaaaaaagatttacacgcctgctatgatcaaagtttggtcatcacaatcatttaaaccacaacactcattggggtagcatcttttggtatgggcgtgtatttggcgtttggtgtgttcggtgagtaccatagtcgtcctttttgattaaaaaaccgctcatcaggtgatgggcggttcattttaaatataaaaaagccaaataatcataacaatttcatacaaaaccgtaataattacttgacttttaatgtattttaaactataatacaaaccatcaagcaagggtggtaggacacccaagcctgataggttaccgccaccgacctatgcaagtggtggcgaccttaggagataagacaatgaaaacgctcttcaaagttatcatcattgttatcctgctaatactaagcaacaacgcttactaagcaggtagcctgtaaaggctgggggcggtgggcttcgccatcgcttcactcctaaaatctaaatatatcttaccaacaatttaaggataagtcaaatgccaaaaatcgttgccaaccccaaaactcgtgctcaaatccaaaaagacagcgatgcacgccgtggggtaaaacccatcggttttaaagtccccatagagtttgccgagctacttgatgagcttgccaaacaatcaggcaaaaccaaaaacatcatcatcatggaagcggttgagctttgggcaaaacagctctaagttaaaaaacttgttcaaatttcaaaccaatctgccaaaagttgcttttttctgactgatttcataattttcacagacatattttttggtatcgtgtcaaatcaaacggcggtagtcatcagcaatttaaacaccccaccattgacagcattatgagacaagcagggctaaacgcttagcccttgcaacacctcgataactaagagacgatgatgttataccccattgcaatcttaaaaggcgatgataaaaccgcccatggcatcttttttcccgatgtgccaaatcttgccagtgcgtgcgatgagtgcaagacatacacaaaatggcgttagaatgccttgatgtgcattttagtggcttggtagcagatggcgaagaaatcccattgcctaccaattttgatgcacacacccaaaacagccaatttgatggcatgatgtgggcatgggtagatatggacttgtcaaaatatgacataaaaagccacaaaatcaacattaccttacctaaccatctgattgccaaaattgacgaaaaagtctcggctcacaaatcgctatacaaaagccgttcaaactatctggcacagcttgccatggcggatttggcttgacataccccatgtcaagccattttaaggcaataaaaagcccataaaggggtgtttatttgggcaataaaaaaccgccctatcatcagataagcggttggggggtgaatcaggggtaaagcaataaaaaagccagataattaaataaaaggatttggctttggggctggtagcaagacactgtaacaaccaagctactgtacactcactagcagaaggaaaaagtgatgaaaaccttaatcaaactcatcgttgtcatcatcttgctactgataaagcggttctgcttactaagatgatgcctagcccaagtaagtaccaaagttgcaaaggctaggggctaacaaggaagttagccacccctgatctttattatgccatggtttttgatttttgcaagggttttttatgacagacagcaccacatcaccagcacgccaaaaggctaccaacacttaccgccaaaaggcacttgccaacattgctttggtgattagccatactgagcctcatgctttagatgccttaaatcagattatggctcataaggattgctctaaggcaatggcaattaaggtggcgttggtagagtacgccaacaccctaagtcaaaccagccgctgattaaagacagcttgattagctcaaattggcgatagcactgttaagggcattaccgcatacccctgttggggcttgttttgaccagccgtgttcaagccgcaacgcatagcttgtattatcttgatgtgggtttgtgatagcccacactttgcccaatatcgcccacaaacccaagttgacgccatacttcataaaggcaaataccaacgctattggctaaattcaaactgcgtgaatctggcaacataggcagccgtagccaatgattagcaccaatatcagcacgcacctcttcaggtaatccatcggtctccgaaccaaataccaaggcgactttatgctgatcattatccagcttaaattgatattcataaaacggacggctaaacttggtcgtcatggcaacaatacgctccacgcccaacgattttagtgccgattttgtctcttgccaattatcgtgaacgcttaaagttgcgtattcatgataatcaagccctgcccgttttaagcgagtatcatccaactcaaatccaagcggtttgaccaaatgtagctgagcacctgtattggcacataagcggatgatgctgccagtattattgggaatttttggggaaaatagcacgatatgaatgagtgcatctgaaaactgtgacatgaactttactaacaaatatggcgatgctacctattgtactctgaaacgacctattgtgccataattttgattgaattcaaagataaaatttataaaccttaccaaaagtttacaaagtgtaataaagtattataacatgc

SEQ ID NO: 25 - DNA, 31147 bp, Moraxella catarrhalis
tttttggtaatggcttggacaatggtctgtagtagtaccgttttaccagctttggacggtgcaacgatgatagagcgttgacctttaccaatgggtgcaatcaaatcaataatgcggcctgttaagtcctcggtcgtgccattgcctgcttcaagtaccagttgctgggtgggaaaaagtggggtaagattttcaaaaatcagcttgtggcgactacgatcaggcgtatcaaagttaatttcactcacctttaagagagcaaaatatctttctgagtctttaggcggccggatctgccctgcgatggagtcgcctgtttgcaaattaaatctgcgtatttggcttgggctgacataaatatcgtctggtcctgccaagtatgaaccttcacttgagcgtaaaaaaccaaatccatcaggtaaaatctcaagcacgccattgccataaattgcttcgccatatctggcatgtgtctttaaaatggcgaaaataatgtcttgtttacgactgcgagccatattatccaaacccatatgctcagcaatagcaagcagctcgccaacggatttactttttaattcagttaagttcatagataggtaagatgtgtgatgatgcacccaaaataggcagtgatggttttgcaaggtatagaaaaagaaaaatgcaatctcaagaaatcgattgcaggtgcgtccatattaagcgtaaatcaagcatttgtcaagcgttagggtgaacttcgggtaaattatcaaacattttatgcaaaaataaacctgatttgaaccgtggatcaaatcaggtcttaagataagttgatttattataaatgcttgtcaagcaaagcggcaaactcagattttggacgaccaccaaccacagtttctacccgctcaccatttttaaaaacaaataaggtcgggatgctgcgaataccaaaacgagctgcagattgtgggttggcatcaacatcaactttgacaatcttgacacgaccttgataatcttcagccagctcttctagcacaggagcgatggctttacatggaccacaccacgcagcccaaaaatcaaccaaaaccagaccatcagaatttacaacatcggtatcaaagcttgcatcagtggcattaataattgacataatttgctccctttttaatttaacagttttacagtgaataaatggcaattgccatgattaagtattatgtggtttcttgtaaaaaaattcaagatgtcagcttaaatgtcaagtcatgatataataacagccttgttgccccaagccttgggcatggcaattgaatttattaaatttactgattgagcaaataaaagatgaccttaactgatgctgatattttgcgtatgaatgcactagagctttcgcatgatgacctattttttcatgaatttgccaaatcaattaccatttatgaagatgaggacatttgggtgctggataaaccagctggactcttgagtgttgatggacgcatgctaaaggtcagtttgcagtcacgacttttgcgtatcaatccaaatattaggctgatccatcgattggatatggacacttcagggctgattatttttgccaaatccagtgaggctcaaacgcacattagtaagcagttcattgaccgtattccccaaaaagaatatcaagcggttgtgtttggaacactgatgatagatgataaaaagggtgtcgtcgatgtgcctgtacgctatgaaccaaccactaagccacgccatattgttgatatggattggaataaacgggcgttgactcattatgaggtgatgcatcatgaattacgctgtgatgacaatggtagggcatatcctgtgactcgagtggcactcaaacccatcacagggcgtagcatcagcttagggtgcatatggtgcatttgggccatgtgatgattggtgatcccatttatgctgaagatgtggcactcaaactgtcaaatcggttgaatttgcatgcacacaagcttcgcttaaagcacccaacgcatggcatttggatggattggttcagtccagtgccattttagggcggtgtatttattggctgatgacccaaagatcatgcaccaaatccatcagattagcccagaaacgacggcacattgatacagacgcttggcgcgtgagcctgtaccacaaaataccatcacaggttttggtgcgtggttaatcagatcggcgaatgcttgggcttgtgcaagatgaatgtcatcaataccaatgggcagagtgtgatagctaagcccagcgtttttagcactttgagcgatgtcataccctttgggttgtcctttaatctcatcatcaaaacgcagattgatcaggcttttaaagcccaatttggcaagcccatcacactgcttgggatggatttgtttgtaaagggtgatttgactatgcatgggtaaatccttaatatgtgttttgatttatgatacccaatgacaagataacttgcaattttgatttggcataagcttatgacggtatgacatggttgtcagtgtaattttaaacataaaataaggtcgaagcggtatttaaagatctgtgctaggcttagttagactttgtacggcttgattggcacttaaaaaaatgcaccctgacagattttcaatcacaggactggtctttaaaatatccatcatagggcccttcacctcggccaaatgtaggtgctgacctcgcttgatacagctttgattaaaggcacatagcatctcttgggcggataaatcgatatgattgaccgcagtcataatcagcacaatatcatgaatgttggtatcatcagataatcgcattaaattggcatgaacagactgagcattaccaaaatacaggctttcatcgatgcgtaaaagtaacagcccatcaaaagtagttgccgtatgtcgctcaatattgcgaaaatgctcgctgtcgccaacacgccccacgatcgcaatgtgtacttggtgtgtccgataaatcatcattgcaaaacttgccaaaagcccgacaaccaaaccgctatttaaaccgaaaagaattgaggtgaaaaaagtaatgccaaaacagatggcatcggatttatccagctgccatgcattgatcaaggttttggtatcaatcattgagatgacagagctgatgatgactgctgctaagatagcgtagggcaggcctgtcaaatattgcccgaaaacaagcaaaatcagcaatacgcccaaagcacaaatgatggatgccaatggtgttttggcacccacagataggtttaggctggtgcgtgaaatgccccctgagaccgcaaaaccaccaaagaggccgctggtgatattcgctaagcccaagccaccaagttccttgttggcatcgtatgactcacctcgtatccgtgcctgctgtgcagagatcgtacttgatgagataaaagcgattagtgcgatcaagagtgccgagggtaataaatctagtaaagtggttacagaaaaattgggtaaggtaatctttggcaatcctgtgggcaaaggttgtagcaatctgatctgcatttgctcaaatccgatatgatggctgagccaaatagaggtggcaacaattaaaatgacaaaaaagcgattgccaaagccgcgccactgagcgggtagccagccccaaatcatcgcctcaccataacggctgataataaataacaaggtggcaccaatcccaagtaacgctgtcggcaaatggatgggctgattgctggtataaatacttaaaaataagttgattaagctgtcggtatttagaggtatgccaatgatgtgcttgagttgactaaaaataattaataccgctgccccactgataaatcctgaggcgacaccacgactgacaaactgcataatccagcccaaacgaaccagtccagcaatcaataaaatcccgcctaccataaaggcaagaacaatggcaagtgaaatatattgtaagctgcctgtagcgtagccagacagtgccgatgcagtcatgatggcagtaattgccacaggaccgatggaggagacgctactggcgcctatccatgcatagacaatcacaggggtaatggcggcatacagacccatgatgggcggtaatcctgctaaggttgcgtagcctaaactttggggaataaccagcactgccatcatcagcccagctggaatgtctgataaagcagtgcgtgggtgctgaatgagctgtaaaacccaacgaggcagtagagcttgtatgttcatcggttattctccgtaaatcttgataccttggataaatatacagtgtctagcatgctcaccgtataagtaagataacatccgctttttggcaatgtacgctcagctgttggcgtctatcttccagctaatctttggatagatgccgtggcgactgcttgtcacgccgatactcatgtcagaagcagataaaccaatttgtgcattttgagcttttttaatcaaagtggtgtgcggtatactctctgaatgaagctaagtgtagtcatagctgtgataaatattgggattgacatactgtggtgtgatattggccgtggtggcacagcctgataacaccaccatagacgctactgtgatgatgaattttttcatcacaaaaccccaatgaaggtcattttaagtttttatttgaccataaaccattgggcgtcaatgctggcttagcgacgagaagcacacaaggggctgttgggcgtttgctcaagctgcacccattcgctaggcgtataagcgtgaatagcaagggcatgcaccataccgccgttgacagttaaaaaaggctgagccaaggcatagactgtctgatggcgagctgccagacgctgtttttcaaaagcgtcgctgacgatcacaagcttaaagtggctttctttgccttcaaaatagccagcgtgcatatggctttcattttgcaatgatagtatacttgggctgagtacttgtagtgctgcagttaatgcctttgctgtttgattattcatgataatgacttaatttaagctgcttaattgggttaatgaatgttttgtgatgtctgatatagcggcatcactgttgggactaaggcttttaaattggcaatgcgattggtggagcttgggtgtgtgcttaaaaactgtggcacgccattaccgccagctgactgcattttttgccacaaagtgatcgcagcatttgggtcatagcctgcacgagccatcagctcaatgccaattttatcagcttctgcttcttgggtgcgtgagtgcggtaaatccaatccaagccgacctgccaagccaaccaattgtgcttgcccacctgacaatccaagggcattcacggcaatactaagcacaccttgggtggcaatatgacgactggctttttctcgtgaatgttcacgcaaagcatgtgccatttcatgtcccatgacagctgcaatttcagcatcagttaatctaagacgctcaataatgccagtataaaagacaattttaccgctcggcatgacataagcattgatttgattgtcggtgatggcgtgtactttccaatcccaacgggtcgcatctgggcgcaaaaccgccgtttgtggaatcagacgattggcgatacggtgaaggcgtcgaacttgagcggtattgttatcaagccgacctttggtgcgtgcttcattgatggtttgtaaataggcttgatgagatagctgcatgatttcttggcttgaaattaacaatagctgttttcggtcagcacctaccacgcctgtactggttgtgctagcacagccaactatggttgtggtcgtagccgctgccaaagtcactgccaaaatattttttttgataaaattttgcatatttaccctgctgtaatgactttaatgccttaaaattgtcatgcttattgtgattataaaccaaagccatccataagcctagccatctcaataaaaaattcacaaatcatcatcgtttatagaaccactatttaagtagctatttttaaaaagccattttatttaaagctcgcctgacctacccgccaaaagccttgtcatcaaattgtcatataattttcatataaccgtcatctatcagtcattaaatcgtcatgcacgatttttacaatacgcataacttatgtgataaatctccttagcttttaacatctatatccttaatagagtttacccaacggagttatgatgaaaacgaacatcaaattgattggcctatctgtcgctgctgttatcgcgctaactgcttgtagcaaaaaagacgaacaatctgctgcaactcagccagaaccagctgcaacgacagcagctccagctgacgctgccccagccgctatggaacaagttgctatcaacatcacaggtgcaggtgcatctttcccacaaccaatctatgccaaatggtcagctgatttcaaagaagctaccagcggtcaagtgaactatcaatcaatcggttcatcaggtggtatcaagcaaatcatcgctaaaactgttgacttcggtgcttcagatgcgccattgactgtggatgagctaaatgctgaaaacctaatccagttcccaacagtgatcggcggtgttgtacctgtggtgaatatcgaaggtatcgaagctggcgcgcttaagctagatggcgaaactttggcaaatatctacttgggtaaagtgacgaagtggaacgacccttcgattgttgcacttaacccagatttgacactgccagatgctgacatcaccacagtattccgttcagacggttcaggcacgacctttaacttcactgactacctaaataaagtttcaactgactgggcaggctcagtgggtgtggacaaagccatcaaatggccaaccgcttcttcaggcgctgctggtaaaggtaacgaaggtgtagcaagctatgttagtcgcatcaaaaactcaatcggctatgtagagtacgcctacgccaagcaaaatggcatgtctcatgtagcacttaaaaacgccgctggcaaatttgttcagccatcagctgacagcttcgctgctgcaggtgacatcgattggtcagcagcacctggctttaaccaagtgctaaccaactcagaaactgcaggcgcttggccaatcgctgctgcaactttcatcatcgtacacaaaaacccagaaaatcctgagcaagttgctggtgttctaagattctttgactgggcatacaccaatggtgaccaagcagcgctagatcttgactatgtaccattcagcgacaaagcggttgagctgttcaaggcaagctggaacgaagtgaaagactcaagcggtaatgcagtttatgcacaataagctgccctataagctgcgatgacttcttgaaatgtggcttgtcagaattggcaagcccattatttcttaaaatacagccaatttagcaaaatcaggggaattcccaaatgaccacccaaaattccgcactcgccgccagactcagtcgccaaaagcgacttgacggcgcttttgtttggacaaccaaactgtctgcactgcttgtacttttaactttaggcggtatcatgctgtcactagtctttggtgcaataccgagtattcgcgaatttggtttaaatttttataccagcagtaactgggatccagtcgctggtcagttcggtgcgttggcaccaatttatggcacaatcgttacctccattatcgcggtcgtgattgccgtgccagtcagttttggtattgctgtctttttgacagaactttgcccaaacttcctaaaaaagccattgggtatcgccattgagctgctggctggtattccatcgattatctatggtatgtggggtttgtttgtctttgccccttggttcggtgataccgtgcagccatggctaatcaatcatttggcaggactgccgatcatcggtcagatgtttgttggtgcgcctattggtatcggtcttttcacagcaggtttggtacttgccattatgatcattccattcatcgctgcgaccatgcgcgatgtgtttttggtggtgcctgatttgctaaaagagtcagcgtatggcatgggtgcgactacttgggaagttgttaccaaagttgtgctgccttataccaaagcgggtgtggtcggtggtctgattttgggcttgggtcgtgcgcttggtgagaccatggcggtgacttttttgattggtaacacctttaatatcaatacaagcctatttacttctggggtatcgatcacctcagccttggctaacgaatttgctgaagcctcaagcgagatgcacttatcgtcgctgctacacttaggtttgattctgtttgtgattagtttcattgtattatcagcctctaagcttatgctgatgaagatcgacaagcgagttgaaaaataaggataataccatgattaatgaaaaagcaaattttgccaatcgcatccatataccaaagtatcatcgccgccgtgcggtgagccgctttgcgatgggattgaccgttgttgcgatgacttttggtctgttttggttggcttggattttggtgacattatttgcccaaggtatccaaggcttgatgtctatgcctgtgtttggtatggatacaccaccgccgatggtcgaaggtggtctgcgtaacgccattgtcggttcaatcatgatttcttttgctggtcttgcggtgggtacaccgattgggattttaacgggcgtgtacttagcagaatttgaccaaggcggctggcttggtcgtgccacgcgctttatgaatgacattttgctgtcagcaccttctatcgtgattggtttattcgtatttgctttgatggttcaaggtcgcggattctcaggctgggcgggcgttgttgccttggcggtgattgtgattcctgtggtggtgcgtaccacagaaagcatgctgctacttgtgcccaataacctgcgcgaacgaggctatgcactaggcacaccaaaatataaattggtcagccacattaccctaaaatccgccaaagcaggtgtgattacaggcgtgctgcttgcttttgctcgtattgctggcgaaactgcgccgttactatttaccgtgctaaataaccaatactttagcacggatatgtctcaagcgatggcaaacttaccaaataccatctatcagtttgcgatgagtccgtatgacaactggcatgctttggcatgggcagcggcgctactgatcacttttgcggtattattgttaaacatcatcgctcgtgctttatcgtccaaagcgcattaagagtcaattgatcttagccaacatagccaaagtgtttgaacaattgccaaatataaggaaaactcaacatgaatacacttaaccaaagtctaaatccaaccatgaacacagcgtttactaatagcaatactgatgacaaaactctaagccaaactgccgccaaagtacaagtgcgtaatcttgacttttattatggtgattataaggcgctcaaaaatatcaatttagatattttggataaaaaagttacggccttcatcggtccatcaggctgtggtaaatcaacgcttttgcgcacgctaaaccgtatgtatgacctgtactcaggtatgcgtgcaacaggtgagattatcttggataaccaaaatatcttagacagccgcgtcgatgttaacttgctacgcgcgcgcgttggcatggtgtttcaaaagccaaccccatttgctatgtcaatttatgataatgtggcgtttggtgtgaagttatatgaaaatttatctaaatctgagcttgacgatcgcgttgaatgggcacttcaaaaatctgccctatggaatgaagtaaaagacaagttgaaaaaatcaggtctatctttatcaggcggtcagcagcagcgtctatgtatcgctcgcagtgtggcgacgcgccctgaagtgttgctacttgatgagccgacatcagcactagaccccatatcaacaggtgcgatcgaagagctgatccatgatctaaaacaagactataccatcgcaatcgtaacgcataacatgcagcaagcggttcgctgctctgacttcaccgcttatatgtatttgggcgatatgattgagatgggcgaaactagccaaatcttcaacaatccgcaaaatcaagcaacggcagattatatcgctggtcgtcacggctgattgatcaagtaagattctctgtcttgggcccaagctttggtggggcgatcaaaggtgtcgtattttgatcgatgtcttcttacttttatgaattaattaaagtttgttaaacgaattaagccatgatttgtggctgttatcggacaatatttatgttacaatttaactcagcccttacccaaaagccttattcaatctacccaaaagccgttttagggagttcgtcatctatgaatgcaaaaatcttggttgttgaagatgagcctgccatcaatgagctgattgcagggactttggatttatcagattttgatgtggttcaagcctatgacacccaaggtgcttatgtggctgtggtcgacgaaaaacctgatttgattttattggattggatgatgccacatggagagtctgggattgattttgcgcgcagactcaagaaaaacccagcaaccgctgacattcctatcattatgctcaccgccaaaggtgaagaagataataaagtttatggattagatgctggtgttgatgattatattaccaagccttttagtactcgagaattgatcagccgagtcagggcagtgcttcgtcgcacaggcatcgacatgggcaaagagctgatgcaggcgggcaatttatccatcaacacagccagtcaaagagttatggcaggtggtactgagattactatgagtattaccgaataccgtctgctttgcttttttgtgacgcactcagagcgagcctatacacgtgctcagatcctagatgcagtgtggggtggtaatgtttatattgatgagcgtacgatagatgtacatattcgccgtctgcgtaagctgctggcaccttatggggcagatacactgattcaaacagtacgtggtacaggttatcggttttcggataaatcatgatgaaatactctgcggtcgattttggtttattggtagagaatttgaccgatggtattgtggtcatggatatgagtcgcttgataattgagtacatcaatcctgccgccaaaagcttacttgccatcacctctaatgatacgcatgctcctatcttgccaagtatgatatttaaaaatagcgtatttaaaaagctttatgatatttatcaagaccaaagcttgcccagttcgttttaccaaaatcaccctacaattataggtaatgtcctaaatctaagcttgatgcgactggttgataatcgctgtgctgtcatcatcaaagattatacacacatgcagcagcttgagcagatgcggacagactttgtgggtaatgtatcgcatgaattacgcacgcctttgacggtgattttgggttatcttgaaaattttacactaactgatgatattaaacctgcatggatgcgtggactaaaactcatgcacgagcaagccattcgcatgaatgacttaatcaatgatttacttatgctgtcacgccttgaaagtgacgaaaccaagccaatggctgaggtcaacatgccacgcctgttgatgcaggtgtttgatcaagcgtctgccagcaatcaagctgggcatctgattgatattcatctggacactgataaaaatattttgggcattgaggcttatttgtacagtgcaattattaatttggttttaaatgccatcaaatatacaccgtcaggcggcatgattgatatcatttatgaagaagatgatggcgatgtacatctgtcggtgacggataatggtattgggattggtggcgagcatcttgggcggctgactgagcgattttatcgggtagacagtgggcgtagccgtgcgacaggtgggacggggcttggacttgccattgttaagcatgtgctaaataagcataacgcccgcctagaaatcagctcagaagaaggcgtcggttctatgtttcgtatcatcttccctaaaattcaaaccatctctacacagaccttgtcaacataagtgatataatagatgcccctatcagataccgaaaaattagccgctatcgatatcggctcaaatagtattcacttggccatcgctgaacgccatggcgatcagctcagacgcatcgcttcgatgagcgaaaaagtacaattggcgatgggacttgatgaatgcaatcacttatcatcggctgtcattgatcgtggtattgaatgcttgacacgatttgcagggcgtttgggtgatgtgaataattctcggttgcgtgtcgtggcgaccaatacactaaggcgtgctgtcaatagccaagaatttatcgtgcgtgctaatgatattttacctgtgcatattgagattatctcaggacgagaagaggcacggctgatttatttgggtgtatcgcacacttgcccaagtcatcagcaaaggtttgtggttgatattggtggcggctcaacagagctgattatcggcaaaaatctaaatcccatactcaccgaaagcacgcaaatgggcgttgcaggttttactcagcagttttttggagatggcaacatcaacgcactgtcttttgaaaaggcgatttatgtcgcccaaaaagaaatcattaagtatggcagccactataaaaaaactggttttgaggaagctgtaggatcatcgggtacgattaagaccatccaacaagcaatcgcagggtttgggttgggtgatgagattactttggcaggcgtagagcaattaaaatcgtctttgattgcttgtggtcatattgatgccattgatatggcaggtgttaagtcgcaccgcaaaggcatctttcctgcgggtgtggcgatcttacttgcgattatgcgtgtatttgggattcgcctgcttaggtactgtgatggcgcgctcagagaaggcgtgatgtatgacatgttatcacgtatggattttcatgatgtgcgtgatgactcggtggggatgctgattgatcgatttggtgtcgataaaaaacaagccaagcgtgtcgccaagacggcaggctcgctgtttaatcaggttcataaacccttaggcttagcgatagaaggtgaatacatgcttaggcgtgcagctttattacacgaagtagggcttgccattgggcatagtagctatcataagcattcaagctatttactcaggcatgcagatatggcggggttttctcgtactgatcaagaaaagctgtctttgttggttcgttatcatcgccgtaccattaatggggatgattgcgaccgaattatcaaaaatgggggcaagagcttggtttatttggcgcttttattacgcttatctgtcgttgcgaatcatgggcgttttgagatatccaaacatcagctaaaacttaccattgataatcatcactggcatgtgaccgtaaaaatcgaccgacctgaacatcaggcgtgcgtcattgatattcaagatgaagcgcattgggttgcccaatggggtatttgtttgacggtatcaagcgtttgatggatcatattgattaaattttattattaatcaataagttggcattagatttcagtttttgacaaattattgcaaaattttttgcaaaatggcttgaccgtatgtatttttcgtgtataatacgcattcatacagcaaatgctgatcagcgggaatagctcagttggtagagcacgaccttgccaaggtcggggtcgcgagttcgaatctcgtttcccgctccaaattttaaaaagcccaaatcgaaagatttgggcttttttgttgtttaaatcaaggggttggaaaaatgtcatcttgtactaccatttgatgacttataagtatatgagtatatacaaatttctgtgtgcctaaattggataccaaattgttaaaaattaacaccaattatatacgttgagatttattatagacttatttttaatcagccaaagatctataaaaataacatcttttattgccaaagatgttatttttaagttaatgaaatattaattaaaaatatcaatatttgtctttaaaatattactattagatgcaaaaactatctcactatgcctgcttactcccatctattgtgcttttaagcttgcaaaatttatgatcctcttttcttatgaactaactactattttagcaatattgattatttctaatttggaagccctttttgttttgaacagcgcatttttatttagaattcttatctttttctaattttagaaggattgatacaatgattaatctgtataaatttttcaaataaatgtcattattgcgtaactaaaatttaatatgaaaacactattctttcattgtcttaatattgactttacctaggatagttatatgcaattctccaaatcaatccctttattttttttattctctataccctttctcgctagctgtggtaccaactcaaaagatgcagccgaacaagatgataaagcagtcgcaacgcctcagctttctgtagaagagctgatcgaaaaagccaagtcggagggtcgggtcaacagcgtgggtatgccaaacacatgggctaattgggaggaaacttggaatgatattaacaccgagtttggtctttctcaccaagatacagatatgagctcagctcaagaaattgcaaagtttctagctgaaaaggaaaatgccaccgcagacattggagatgttggagcatcatttgcccctgttgcagttgataaaggagtaacccaaccttataagccaagcacttgggatcaaatacctgaatgggcaaaggataaagatggtcattgggtaataggttatacaggggcaattgcttttatagcagataagcaaaaagttaataaaattcctaccagttgggatgagttaaagagatctaaatacaaagtaaccattggcgatgtttcaactgctagccaagcagttaatggtgttttggcagcaaattacgcacttggtggtacagaagctgatttaacccccgctttagactattttaccgatttagctaaacaaaaacgtcttggcatggctgatccctcggtagcaaatttagaaaaaggcgagattgaagttgcagtagtatgggactttaatggtttgaattatcgagaccagattaatcgcgaacgctttgatgtggtaatccctagcgatgggtctgtacagtctggctatgccaccattatcaataagtatgccaaaaatcctcacgctgctatgttaacgcgagagtatatactctcagataaggggcaattaaatttggctcgtggatatgctcgccctgtacgtattgaccatcttacaattccagaagacgtgcaatcaagactgctacctcaaaaccaatatattaacgccaggcctattgctgatgctaaagcgtgggaagagagttcggcaaaattgcctcagcagtggcaagagagagtgcttatacatcaacaataattactggcgttggttctggtaaactattatctgaacacctaattcagcatatgttaaaaagttaagaaaatgaaaaatactaataaggttatattggttgtattagatgggttaaatgccgatgttggtttaacatgtatgggctttttgcaggctttgtgtgaacaacacaaagccaaagcttataaattgcagtgtgaactaccctctttgtcgcgccccttgtatgagtgtattttaacaggtgtgcgcccaacagatagcggcatttatcacaaccaaatcaatcgtttgtctaaagaaaaaagtgttttcaattattgcattcaatcaaataaagtgacagccgccgccgcttattattggattagtgaattatataaccgcagtccatttcaagcagcttttgatagacatactaatgattcaagtctacctatccagtttggccatttttattatgatgatgcttacccagactcccatttatttgacgatgcagaccatttgcgcaaaatctaccgaccagattttttactagtacattctatgaatatagatgatgcgggacatagatttggtctaaatagtatgcaatatcgcaatgccgcacgtagagcagatatgcttttatcaaattatattaatctttggttggatgatgggtatcaaataattgtaacctcggatcatggtatgaacaatgatctatctcatggtggcaatttaatagaagaaagagaagtgcctttttatactatcggtgatagatttaccaataagaatatggatgagccaattcaacaaactgagatttgtggaacaatctgcgctttacttaaggtggagcatgataaaacggtttgtaggaatttattaaaatgatagccaaattctttaggtctaggtctgagcaaaccacaaatgtgatcttagtcaagtacccaaatagtggatttgctgacaatgccctgaaaggtcttggagagtatttagcactgctcccctttgttgtattggtagtaatgtttattttattgcccttaggtctaattatttttaatgctttttataatgagtatggtgagtttggttttgggaatttctcaaagatatttaatagcgaattttatttacaggctttggtgctttccttaaagattagtttatatagcagcttgattggtattattattgggtttcagggcgcctattctctatatgcaatcaaagattcagcactggggagagctttaatctctctaaacacgttgctgagtaactttagcggtgttcctttggcatttgcaatgatgattatttttggctctagtggggtaattactttaatattatcaagattcgggataaatgatctaatagatatttattcatttaagggtatattattaagctatgcatattttcaaattcctgtagctatactattactattcccagcaatttctggcctgaaaagagaatggcaagaaagtgctgccttgttgggtgctagtacgcgtcaatatttttttaaagttggattgcctgttttatcacctgctattttaggtacgtttattattttatttgctaatgcacttggtgcctatgcaactgcctatgcacttacatctggcagctttaatatcttgccaatacgtattgctgccatgattgcaggaaatttaactttagagcctaatatggcggcggcattagccttaatattggtaggattaatgctgattataacttttgttcatcagtatttacttagccgctacaaaattgactaaatatggaagctggtaatgtctaagcgtttatcatataaaaatgactatcggctagaaaaagccccattaagcattaagcagtattttcatctaatctttttaattgccctgatttcattgatgatgattcctgttgtggcaacaggcgtttatgcggtttctggcgattggtcacagtccatattgcccgaatcatggactataaagtggttgcttgaaatttggactcaagaaagatttttgtgggcctgtttttactcgctagtgctctgtattggcagtgctatattaagtattattttaatttttcctgtattgcttattgtacacactagcaaaccacaatggcaacgttggattaattttatactgatactaccgtttaccgttccaccaatcgtagcatcaattagtattttggatctatattctggcatacttggtagcaaaatcggtacaacgtttattcttattggttgttatttcacaattgtactcccttttgtataccgatctttggataataattttagagcaatcggggtaaaagatttgattgaatctgccaatttgctaggtgcatcgacaccacagataattgcttatattctactaccaaatctaaagccagggtttatagtggccttctttatctctatagcgtttttaataggtgaatttgtttatgtaaacattttaataggtggccattttgaaacaattcaaacttatttatttaacttaaaaaaccaatccggacatttaagtagtgctgtagtaatctcttatttttgtattctaatcattattacagctttcataaatggattcagcaattcgcaaataatgagaaaaaaatgagctatattcaaataaacaatgcacataagtctttcggttcattgaccgttatagatgatttgaatttaaatgtagaaaagggtagtttagttaccttacttggtccttcaggctgcggcaagtcaactttgttacgttgtattgccggtctggaaacattgaatcagggttcaattatattaaacaatcaagatattacctatttaaaaccccagaaacgccgtattgccatggtatttcaaaattatgctctcttccccaacatgacagtggcagataatgtagagtttggattaaagattaaaaaagtctctcttgaagaaagactgactaaagtcaaagacgtgcttgatttggttgagttaacttcttttgctcagcaaaaaccagaatctttatctggtggacaaaaacagcgtgttgcactggctagagcattagttatggagccagatttgcttttgttagatgagccattatccgctctagatgccaaactacgtaaaagtttacgcatgcaaattaagcgcattcaaaaagaattgggattaactacactttttgttactcatgatcaagatgaagctttagcgatgtcagacgaggtggtcttgcttaataagggcaagattgagcaacattccacgccagacacactatatactcagcctaacaataggtttactgcggggtttataggacattacaatataggatattttgaatcagtaaaatccaaatctgccaagcaactttcgatgatggcaataagacctgaaactatattgttagatacggatgatggagatattccaggggttattcttgaaagaactttgactgggggagtggtgcgttaccaagtcagaacagattatggtgatatatttgatgttgatgtactgaaccatggcaaaattagccaattaaaagtcaattgcaaggtttttttaataatcaaagatgaacaagtgatcaacctagatagttaattttctaccttaggatacaaaacactagctactaaaatgcatcattaacctaaggattgcttcaaggtataaaatgattactcacagagactctcagataaaaaccctggctttgtttgatttagaccacactttaattgatgttgatagtgattatatgtggggtcaatatattgtcgaagagaaattggtggcagatgatgattatggaataaccaatcgacaattttacgaaaattatattgatggaacacttgacgcaactttatataatgaattcgtagctcgattcctaagatccaaaactatgccagtccttctacagctgcgtaataactttattgataagaaaattaaacctgctatgcgtcctaagggtattgtcgctataaataaccacttaagattagggcatgaagttgtcataacctctgctacaaatagttttttagtgcctgcaattgcagaattgtttggaatacactctaagaatacactatccacacctttgcaaatccaaaaagatcttttcactggctttttaaccgacagaccaaactttaaagacggtaagctttaccatataaataaatggcttaaaaatatggaacgagagaatttatattttgaaggtacttatgcttactcagattcaaaaaatgatattcctttacttgaatggtctgataaccctgtttgcatcacacctgatgaagttttagccaagcatgcattaacaagaaattggccaattgaaaactggtctgtcagataacaatgtgctctctcagctgcagttgctataagtagatagcaaaacacatagattatttgcaatctataatttcagcgaaagcttgaggtaatttagatctgctaaaatatcaccgaatgcggccagtcccactgtcacaaatattgtttgtactattctactaaaattttgttccattattattgaaagcaagaaaatctaatgatatgcatagctatcattaagattaatgccagatattggggatgtcttatatttagattttaagataccgatccaagaatgatttgaacagccatatattaggttgaaatcgcctgctgcatataatttttaagcaacaagatcgcatcactgttatcgacatgaaaatttaatttcctgcggtcacaaagcgatagtaattatattttatatttttgcatatccatacaatcaaaaggtaaattcaaagcccaatgctgccattgtgtttatatatcatcatttgcccccatatatggatcagatgtccaaaactgtcaaacaggattttggcggaacgatcataaaaagaaggtaaaatgatgactgatttatccattttagacttatccccatttcgtcagggcgaaacctttgctcaggcagtggataataccgtggcactggctcagtatgccgaaaaattagggctgagccgtttttggattgccgaacaccacaatatgccatatttggcaagttctgcgaccagtctgcttattcagcgtgtattggataaaacggcacacattcgtgtcggctcaggtggtgttatgctgcccaatcactcaccttttgtggtagcagagtactatgggacattggcgagcctatatcccaatcgagtggatttagggcttggtcgtgcacctggtacagatcctgagactgcacgcgccatccgtcgcaatcatgatgattttgcgatgagttttccaaatgatatcaaagagttacaattttattttggtgatgatgcagatagtaataaagtgcgcgcttatcctgccaaaggtctaaaagtgccgctttatatcttaggttctagtaccgaaagtgcgtatttggcggctcaaatgggcctgccatatgcatttgcctcacactttgcaccacgctttttaacgcaagcggtacagatttatcgtaatcactttcagccatcagcagtgcttgatacgcctaaggtcatcgttggcgtaaacgcatttgttgcagataccgatgctgaagctgagtttttggctagcacaagtttacagtttttcttaaatatagtaacaggtcagcgtagcggtatgaagccaccagcgacagacatcgctgcccatatcccagcgcatattgtacagatggctgatagtatgatgtcatgtcgcttgcttggttctgctaagacagtcgcagaacagctcgaacaattacaaagccaagttcaagccgatgaactgatggcagtcagctatatttatgatgtccaaaaacagcatgattcttatgagctattatctgatattgtcaaaaattttaaatagctttaaatagcttagcttaaataattttttgctatgctgaatgaaaaaaaatcactaaataaaaataggcacttttaacctaagataaaaagtgcctattttcccaaagatggagttaaccaatctgtttggtgccaaagattttatcaccagcatcaccaagacctggaatgatgtagccgttttcattaagatggctgtctaaagcagcggtatagattttgacatcggggtgtgcctcgttgactaagcgcacaccttcgggtgctgcgaccaataccaatgctttgatgttagtacagccatgttttttaagcatatcaatcgtagcgatcatactgccccctgttgccaacatcggatccaaaattaatgcagggcgacggtcaatatcactgacaaatttctcaaaaaaaggcacaggttctagtgtcatttcatctcgctgaagtccaacgacagagattttggcagttggtaatagatcaagtacaccatcaagcatgcccaagcctgcgcgtaaaattggtacaatggtgacagttttacctttaatctgctcgcctgtaatttcaccacaccagccttgcatgctaaagctttcaatctcaaaatcacggctcgcttcgtacgccatcagtcgcccaagctcattggttagcgtgcgaaatttataagtgctggtttctttttcacgcatgatcgacagtttatgacggacaagcgggtgatcaatgacatgaatatttaaagaagtggtcataatagtaccttaattgagaagatttgccacggtttaatgattgaaatgtctggcgataccgtgcatgatagcaattttttgccatcattgcactggcttttgtcttgaaaatttgagcaaaaaccactcacaaaacccttgatccacttgctaaaatctttggcgatagcgcgctttggctatttattaagtaacagatcgcctgttttaatccagccttttttgtcgcatagcttggcaaatatccaagttaatattgcaggtagaatgacatgaaagctgatgataagtagccaagtcatggggctgatacccatggcgtcaagtgtgccaatctgaccgacaaagcctgatgtacccatgcctgcacctgaagggatattgaccataccaaaaatcgctgtcgcaaagggagcaagtacagcacctgctaaagtgggtggtagccagattttagggttttttaggatattgggtacctgaatcatgctagtacccagcccacatgctatcgcaccaccgataccattgtctcgatagctcatcaccgcaaaaccgatcatttgtgccgcacaaccgactgttgccgcccctgctgccaaaccgccaagcccaagactgatggcgatcgctgcacttgagatgggtaaagttaacatcagtcccatcgcaattgccacaataatactcatcacaatcggcgataaatctaccgcccacatgatcaactgcccaaggcttatcatcaattggtcaatggcaggactgataaatcctgcgaccgccataccgataatcagcgttgttgcaggtgtgacgatgatgtctaaaggtgtcatacggtggacaaattttccaaactctgcaccaattaatgctgctatgaatgcaccgataggaccgcccatcgccgcccctgcaaagcctgttgtgattgaggtgaataacaccaatggcggtgctttaagtgcataggccacaccagcaccaatggccgctcccattaggctttgtgcttgtttgccaatctcaaccaaccatggtaaatcaagccatgtacccaaatttttgataatcaaacccaaaatcagtgatgaaaataagccaagtgccataaagttaagcgcttcgataccataacgctgccaagagatcacaatattttggcgttcaagatgtgctttaaaagaaaatttggtcataagatggtcttaagttgataaaaatccacgcctaaaaattgttttgtggcgttcatgacaggtcagtcaaaactattattataattcaaaatttatgccaaagtgatgaaaatttgatcgagtatggtgcggttggttgattatttttggctgaattttttgagagatttttaagtatttactatcattgaaatactcaaaaagcgataaaatttctgctaaaataggacgcctaagctcaatgatcatacccaaagtagatttatgaatacccaaacttctttttttaatgatacctctaaaaataatcctagtaaagccaatgatcaaattatcgctcaaatgcgtgccttaattaagctgctaaagcgtcacaatcatgcgtattatgtgatggatgcaccaacgatttcagatgatgaatatgatggtctgcgtcgcacattaatgatgcttgagcagcagcatcccaatttgatacaacctgatagcccgattaatacggtcggtggtgagccgctgcctttttttacacaagtggctcatgaagtgccgatgctatcactgggcaatgtatttaatgctgatgatttgtcagggtttttgcgtcgtgccaatgagcgattgggtatcgccattgatgagtatgaaatggaactaaaacttgatggcttggcggtatcattaaagtatcaaaatggtcaattcgcccaagctgtcactcgaggcgatgggcaggtgggcgaggatatcacgcataatgtcagaaccattcgtaatttaccactgactttgacaggatgtgagcaaatcaaacagcttgagattcgaggtgaggtgttgatgcccaaagcaggttttgaaaaattaaatcgtgaaagcatcgcacaagggatcaagacttttgccaatcctcgcaatgctgctgcaggttcgctaaggcagttaaatgctgccatcgccgccgcgcgtccgttggcattttttggatactcagtgaatgatggattgcctgatggtatcaccacgcagtcaggtgcaatgcagtggcttggtcagcttgggtttgagatagcatcttttaaggttgccaagagtcttgatgagattcaagcattttatgcccatgtcatcaaaactcgtagccagctaccgtttgaaatcgatggtttggtgattaaggtgaatgatctaaatttacaggcacggttagggttcttaagccgtgaaccacgctgggcaacagcttacaaatttcccgccgaaactgtgcccacacgactcatagatgtagagtggcaagtagggcgtacagggactttgacacctgtgggcagacttgagccgataactgtgggcggtgttacggtcagtaatgtgactttgcataattttggtgagattgagcgtcttggggtgatggttggagatgtggtcaatgtgcatcgagcaggtgatgtcattcctaaggtatctggcgttattggtgagctacgccctaccgatgccaaacctatcctcctgccaacggtttgcccagtttgtcaatcaccgattagcttaccagaaggtgaggcgttggcaagatgtactggtgggctatactgtgccgcacagcagcaagaagcattgattcattttgtctctcgccgtgccatggatattgatggtttgggcagtcagtggctgattaagttttttgaaatggggcttgttcagacggtggcagatatttacaaactccacaagcaggctgagtatttaataacgctagagggtatgggtgataaatcagtcaccaaaatgctatcggctattgaaaaatcaaaacagaccaccttacctcgttttatttttgctttggggattcgtggtgttggcgaaagtacagcattgtcattggcgcagcagtttggggaattacagtcgatcattgaggcagatttacaagcactacaagctgtacctgatattggtgagataactgcccaatcaatttatgatttttttcgggcatcgcataatattgaggttgtgcaggcactgattgaggctggtgtttcttggcaagcaatggatacgcctgataaatcatcattgccattgactggagagacttgggtggtgactggtactttaggcagtatggggcgtgatgaagccaaagataagctcattgccttgggtgcaaaagttgctggtagtgtttcagcaaagaccacacggctacttgctggtgaaaaagcaggtagtaagcttgaaaaagcccaaaaacttggcgttacagtcgttttagaagatgaatttttggcactgattgctttatataatcaggtataaaaatgcgttggataaataacccccaaactctgtctatccttgggcttttaattgggtgtatcctgtttggcatgggcagcttaattgtggcgtatgtcgatgttggtgcctatgcaatgtcattttggagattggcaatttcatcggtagtttttgtgctgcttgcacggctattttgccaaaagtttccccaatcaagatctgctttgatttatgcgttacttgcaggtgcagcgcttggacttgatttggcactatggcatgagagcattcatgcagtaggtcctggcatttccacattgctaaatagtttacaaattttctttttaaccttcattgggttttatttttttgctgagcatcaaaaactgatacagcttgttagtctaatactggcggttatgggtgtggtgctaattgccagccctgagtttgggcataatatgcaggcaggttggggctttatcacaggtattatttcaggtgcttgccttgcaatttctttgacttgggttcggcaagtgcattatcatgaaccaacaccactatttagcttgatggctttggtgggtttgggcggtgcgatcgtgatgttgcctttgatgctatggctggatcaagatcacattttacctaaaacaccacatgaacttggctggatattggtctatggcacagtcatgcagtgcttggcatttggtgcgattacttttagtatcccacgcctaagcttggcggtgacagggcttttattattatcagagcctgtggcggcattggtgctggattatttttggttaaataaaaccatcactttaatacagtggctaggtgcaatactgaccatgttcgccatttatttgggttcagtcaaggttagacactgatttaattattataaaacctttggtaattcatcggtttattgggagttttgagctgatacaatctcaatgggcagctccaagccctcagcaaatttatcagagataatatagctgtgccgctcattgacaatattgggcgttacttgaatgattagtgcagggttgctgccatcacggaattgatgagcgatatatcgattaccaagctgatcaacaattttaccaagtacttcagggcttgccatagataatgccatggaatgttgtgcttgtttggcactgatattaaaggcattggcataattcatcacaggttcactatcaattaaaaaaggatagttaaaatcttgtaagttggctttcttggttttagtatcaatataagaccaattaagcttagctttaccatcagcggtagtgatcagttgagggctttgtatctcttgagtgtcacttgtgtcaagttcattgaataaactttcaaactcatgagcgttttggcgtgcattttttgggtcatcgcttaacgcagtatttgttttggcgtgatcgctgatgggttgtagattttgctcaacagtattatcttgacagccaattaaaatgacagccgtcagaaagatgaatggttttatgcgtgatattgtgatcatatgaatcatccaaatagatttttgcatcaaattgaccaaattttaagtagtttggtttgtctaaagattacagctgatttttaaagcctcgctgcttatcgcgtgcaaaatctcgttctttgagcgttgctcttttatcatgcagttttttaccctttgccaaagcaatttcacatttcacccgaccatgtttccaataacaagataaggcaaccacggcataacctttttgattgaccatgccataaagcttatcaatttcacgccgattgagtaacagcttgcgtgtgcggatattatctggattaatgtgtgttgagctggttaatagtggctgaatatgtgcaccaaataaaaatgcttcattatttttaaaaatgacatagctttcggtgattgacattttacctgcacgaatcgattttacctcccagccttcaagcactaaacctgcctcataggtttcttcgatgaaatattcatgtcgtgcttttttattggcacaaatttgattacttggtttttttgccataatttgtccttgcttctattatttttacgattgccaaagcaatgtcttggtttgggcatagtataacaaaaattattcagttattcatctgacatcaattatagttagtttaactaaattttatgagtgattattttaaaatataacatacccaagctaacggattgtacaagatttaaataatttgctaatatacaaagtttaagatgaatgcatgcatgatggacagctaagatttaaccatttcaactaagattttgatgaattttaaggaaaaaatatgctaaatagtcaacccaccctaaaaacactgcttgaacatcgctcaattcgcaaatatacaggtgagccgattgatgacaaagtgttgacagcaatactagaagcagggcgtgcagtttcaacctcaagctttttacaggctgccagtatcattcgtgtggtggataaaaataagcgtacccagttacgccaaatttcatgcgatatgagcgaagaagaataccaaaaagcacttgctgatggcaagcgtttgggtcatgcttatgttgaggattgtgctgaatatttggttttttgtatggatagttaccgccataatcagcttgctaaggtgcagacagattggacggaggttatgatcatcggagcgattgatgcagcattaatggcacaaaatattctagcagctgcagagagtttggggcttggtggcgtgtatattggtagtttgcgtaatgacattcgccgtgcaggtgagattttaggtttgccaaagcatgttgtacctttatttgggctttgcttggggcatccagatatgtcctctaaaattaatcaatctcagcgtccacgcttaccactggatgtgttggtttcaaccgatacttatcaaataccagatgaaagtacgctgaccaaatataatgaggtggtgcgtgaatattatcaaggacgcagattggatttggattgggcggcacaaatcactgcaacctttggcgatgaagtgcgtccatttatgctcaactacttgcaagatcaaggctttgccaaacgatgattgaccaaatttatcacacttttgatgatttatggtttaatcaataaaggtggataagttctgcctttatatttttatatttaaaaatcaaccatatttaaaagtcaacaaaattttgttactatagacattttgttttgtaatcaaaaggcgtatcgccatgacaaccactcctagaaaagttctttatccgggtacttttgatcccataaccaatgggcacattgatttggtgactcgtgcgcttaagttatttgacgaggtagtcattgccgtggcatttgcacatcataaaaagccaatatttgattttgatgagcgtgtggcattggtggagcaatattttgggaacaatcctaaagtgtcggtggtgggttttgaggggttgttggttgaatttgccaaagagcaaggtgtaagtgcggtactccgaggtttgcgtgcagtcagtgattttgagtatgaatttgggcttgccaatatgaatcgaagtttggatgatgattttgaagcagtttttttaacgccatctcaggagtactcatttatttcatcaactttggtgcgtgaggttgcaaaacttggtggtgatgttagtaaatttgttcctgaatctgtattaatagcatttgagcaaaaatttaatataaaataggcagtattatggcattaaaaatcaccgaagaatgtattaactgcgatgtttgcgaaccagtttgccctaatgaagccatctctgcaggcgatgatatttatgtgatcaatccagccttatgtaccgaatgcgttgggcattacgacacaccgcagtgtgtggatatttgtcctgtagactgcattcctaaagacccaaaatttccagagaccgaagatgagctgctggtaaaatatcaaaaacttacctctgatttataaaatgtgttataatgataacttggcagactagacaatcgctggcacaattgtgcgggaggaaagtccgggctacatagggcaatgtgctagctaacagctagggggcgaaagcctacgaccagtgcagcagagaatagaccgcctattaaataggtaagggtgaaacggtggggtaagagcccaccgcgtgactggcgacagctcacggcaaggtaaactccacatgtagcaagaccaaataggaactcaatgggttgcccgctcagagttcgggtaggttgcttgagcatatcagcaatgatatgcctagatgaatgattgtccacgacagaactcggcttatcggtctgcctttacttttctaatatttgcatgattatttgattttatatgatcattagcttttgctatgattgattgataaaattttaaaattttttgattttatcgttgacaagccaaaactttatgctataatttgcgacctgtaacggcgatgtagctcagctggttagagcgcacgactcataatcgtgaggtcaagagttcaagtctcttcatcgccaccaaatatattataaaaattaatgcttgacatataattttaatgagttataatattatccttactctagcgagtaagaatttttctaaaatttaaagttttagaaaaacaaacaaaaaaccgcttgactttaaaacattccatgttataatgttcagctcaagttaatcagacgatgattaacacactatttaaaatccaaactaaagaacaacttgtgtggatttttgtcaatacaagatacttaaataaattatcattcattgatacttattacttatcttaattacttatcttaagtaaggcaaaaatactcaaagttaattcatttacacgatgagcagatattttgagactatccactattgctagtaggtacattacgtacacgatgactgagccagaattatagtcctgtagccaagcttgtcggtatagattggccacgataggttcaactgcggagtttgctcatggctcagattgaacgccggcggcaggcttaacccatgccagtcgatcgccgttatgacgcttgcttctga

SEQ ID NO: 26 - DNA, 34279 bp, Moraxella catarrhalis
cgagattgttaaataagcgagattattatatgacaaacctacctctaattcaaccccacgacacacttacccaagcggtaaacgctcgtgagttacacgcatttttgcaaaataaagaccattttgcaacttggattaaagaccgtatcgcacaatatgattttcaagaaaatcaagattttgtgactttttcggaaaattccgaaaaaggtcgtccacgcctagaatacgccatcaccctagacatggcaaaagaactctctatggtagagcgtaacgagcagggtaagatggctcgccgttattttatcgagtgtgagcgtgtggctcgtcaggtcatgactgcccccatgccagtccgtcctaccacgcccacactgtccaaggtggattttgccgttttgcagacggtcgtgcgtgatttgtcagcacagatggcacacccaaaggcgagcgagatggcaatttgggcgagactgcgtgccgtgtgcgatgtgtccagcattcacaacattcgctatggcgacatgtggacggtgcagggcgagctgtctcgcattgggcgtattttgcgtccttatgctgattttcgcaaatccaccgaaaaaacactcatcaaacgtatttgcctaggcgaccacaatgctgtatgggaagccatcaaagtgatggatgataccgcagacggctattcactatttgttgatgataaggcgttttatgccttagaatgcttggcgatggcggcgagccatgagtgataaacgcccacccctaaattttgactacatccaaacccaagccacaggtcattatgtcagccgtatttttcctgccgttggcatcaaactacacggcaatggcaaaaagcatcagccttgtccgctgtgtggtggtacagaccgttttcgctgcgatgataaggacggcacaggctcatggatttgtaaccaatgcggtgctggcacaggctacacactggtgcgtgattacaccaaaaaagacgcatacgaaacgcacgctttgatggctgacattttgggcattgacggcggcaggcagattagcgaagttacaaacaagcatgggcaaaagcccaagccgaacgcttatccgcccaaaaacaagccaaaaaacaagcacggcaaaccgctgccaaaaccgcccaaaaccgctttaacaccgccacgcccaccgacacccacgcctatcttgccaaaaaaggcgtacgctcgcacggtcttagggtagatgacaagggcaatctgctcataccgctgtattatcacaacacccaaacaggcaacatcacgctgtgtaatgtccagtccatcagtgctgacggcggtaaattattcgtcaaagatggccttgtcggcggtgcattttatacgcttggcgatgtgctatctggcgatacaatcctaatttgcgaaggctatgccacaggggcaagtatttttgaagcgttaggcagtatctaccctgtcatcatcactttcaatgctgataatatggttaaatgtgcgtctattatccgcacgctgtacccacaacaccgcttgattttttgtgctgatgacgataaagctacagaaattaagacaggcaaaaacacagggatatcagcaggggatgagtccgccacactcacagggagcgaagtcatcagccctgattttggcgatgatgaacgcacgaccacaggtgagctgaccgattataacgacctgcacgctcattttggcatggatgttgtcaaagcccaattggtatatgccctaaaccgcccacgccccaaagtcatcacagacacgcacggtggttataccttagattatttgaatgaaaattttgctcaaatcaaagacattggcaaaatcaccaacaaaatctatgacttagccaatcacaccgagatgaccaaaacccattttatggggttggtcggcaaggaactggcgaatgcgtggctttttggcggtaaacaaaaaagcattgaccgccgtgaagtacaagacaacaccgccgaacagtttgcagcagcgtacggcgatatttttgagcaatactggtacatccaaggcacaaaagaagtgtttaattttaaaacttacaaaagacagcctgttgataccttacgcctagaattccccaacgaatttgataggtggaataagtcaaaaagccgtcaaaaagtggaatcggacaacatttggtttgacccaaccgataaaaaacgcccccaaaacggcgaaaactacatcaatacatttaagagctttgtcatacagccatacactgcccaagaactgggcattgatgataagcagttgaatgagcattttatgatgggcatgtgttcatccgttatcaatcttatcaagcatctgtgtggcaatgatacccatgctttggattgggtgctaaactggcttgccatacccttacaaaacttaggcacaaaaatggataccgccttgattgtccatggacacattcaaggggctggcaaatcgctgttttttgaccgtatcatgagaaaaatatacggctcatacttgcttacacttgggcaaggacaactggaaagccagtacaatgactgggtagaaggtaagctgttcgccgtctttgaagagatttttcagggcaaagaccgttacagccacatgggtatgattaaacagctcatcacaggcaataccgtttatattaacaaaaaattcatgagcggctggacacaagataactttgttaataccgtgtttttgtcaaacgatatgcagcccttatcgctggatgaaaccgaccgccgtcatgttgtgttatatccgaccgccgttattcccgatgccttgcgtcatgaaattggggcggcgatagatgacccaaatcagtcgttaatacgagcattttacacttatcttttactaaaagaccccaaaaatcaaaacgcccacagcacagccatcaatactgaagccaaggcacagcttacagaaattagcattggcagccacgagcggttttatatgtactggaaaaatggtgatttagagataccctatgccacttgtttgaccaccgacctttatcattattatgtcatttggtgcggtcaaaaccgtgagtatgcccaatcttccgccaaggttttaagatatattgccctgcgtgaacacaaaaaacgcatacgctatcgatacaaaataccagcaggcaaccacttaaaagacgacacaaagcaagggatggtatacatcatcggtattgatgaacaaaaccaaaatccccacacatttgggctttgcatcagtgcgttcagacatgctataatgaaagctaaaacacatcattctatgccccaagaaagcattcgttcatcttatgaaaattccaacccatttatctgattaatctgtgcatagtgtgcagggtttgttcagggtctgtacaaaccctgcacaccctgacaaaccttgatattcctagcttttagcctgccttgttcaaagtgcaggctaattttttatctaccgcttatcacaaatttttatttttaaaaaaagtttctcaaaaattaaaatcaaccctgcacaccctgcacaccctgcacactttttaaaatctttattaaaaccaatgggttataaatgtcaaatctgtgcagggttttgttcatggtttaaaaaatttgacaaaaccctgcacagcttttcataatatccaaaaattttaagaccatgctcatgacaaacaaaatacccaaagaccagctcattgccattgccgaaagttttgcaggggttagccgatttgctgatgcctgctatcgttactactattaccacgaccaagccagccgtgattatttgttgtcatcattggcggtagagtttgccgaatatctgaccaagatacctaccaaacatcatcagcccatcatcaataccgccttgatagagataagctacccccaaaaaaatcttagtcgctctactttttgtgcaaaagagcgggcttgttgcatgggaattagtcgtcgccaatactataacttacatgcaggtgaagccattgataatatcattggcaatattacaggtattgccaaagttgtcgctggcaaggttcgtgaacagcttggaataaacttaaaactgggctattgacagattgcacactttttgctatcattttgtcaaaatcaataattgtaactaaacgctgatgacgacattgtcatcagcgttttttattggtaaatcacggaaaccatggcaaaacttggcaacttaccaccacgcttaaaacccacccaatcccataccccaaagcgtaactggggtaaaggtcgtgaaggcagggcatggcgacgacttcgtgctaagatgttagttcgtgataattacacctgccagttgtgcggtcgtattggcggacgcttagagcttgaccacatcgtcaacaaggcggtcggtggcactgatgacaaaacaaacctacaaatcttatgctaccaatgccacaaaaccaaaacccaaagcgaaagcaaggcggggggcgtgctacaatttttgggctaagcgtgcggacaccacgccccctctcgtttataaaaaaaatttgatttgggaaaaaaatctccgtttctccgccaatgaacgcagtaataaaagttacataaaattacattataaagaatatagaaaggttaaacatggcaatcacccaaaagcaggaagcgtatgctaagaatgtggcaagtggcatggactttcatacagcagccctaaaagctggctgtaaaaatcatgaatctgcccgaaagttcgtggcggacatggcaaagcgtgagaatgtgcaagcccgtatcgctgacttaaaaaaagtacaaaacgctctagggcaagacagtcaaaacaaccaagacaaccaaaacaatcaagacgagccgactgacgcagtgccaaacgcaccccaagccccaaaatatgaaacgccttcagcatttttgacagcggtgtttaataacgctgatggtctgtatacgccgaaagaacgcattaacgccgccatcgctttattgccctacaccgagcaaaaactggctcaaacaggcaaaaaagaagatgcgttggataacgccaaaaataaaagtgaaaatgggcgatttgccacactgtcaaatcaggcggacatgtttggcagtgagcttttgcaatgaaatacatgaatgatgcttgcgacaccgccgaattaaataaccctgccgatggtcagggttttgtttatccagtgattgacggtgaacataaaatcatgcggtatgatgattttatcaaagagttttgttttttaccaaaagacataaggttgaatgatgagcgatgatttgattaaccacccagcacattacacttcttgcccgagtgggattgagtgcattgagattaccgagttgttaccgttttgtttgggtaattgttataaatatttgcaccgagcaggattgaaaggcgatgaattaactgacctaaaaaaggcggtattttatgctcgtcgtgcttatttaaatggcgagaaattgaccgaaacagcccaatcgctgatttttaaagttgctcgccatcaggctgacgaaaaaagaaagattttatcttgttttgccgctgcccacataaaaaaattttacctatttttacaagagcatgttagcaaatatgaacaaaagcgtaacaccaacatggacaaccgccctgcctgattggcaagagcgtatcgttaaaggtgagtcccttatcccatgtaaaccgctgtttaccacgatgagcgagattgctttgcgtgtgtttaaagagttggcactggttgatgtcatcggttgcccaaagattggggcggtgagtaaagcgtgggtgtttgagtttgtctcggtcatttttggggcgtatgaccctgccgccaaaaaacgcttgattaaagagttttttctgttaatcagtaaaaaaaactcaaaatctacgctagccgctggcatcatgctgaccgctttgattttaaacgaacgccaaagctgtgagcttgtcatcgtcgccccaaccaaggaggttgccaataactcattttcgcccatgcaagacatgatacgagtagatagtgaattatctgctctttttaatgtctctgcccacaccaaaaccatcacccaccgatttacaggggcaagtttgaaggtcatcgccgctgagtccaacagtttggcaggggtcaagggggcgtatgtgctggttgatgagctttgggtgtttggtaagcgagcaggggcggccgccatgctccaagaagccatcggggggcttgcatctcgccctgagggctttgtcatctatttatctaccatgagcgatgaggcacctgctggcatttttaaagaaaagctggattatgctcgctcggtgcgagatgggcagattgatgatttgcgttttttgcctgtgatttatgaatttccgcaggcttatattgacagtggcgattatatacagcctgaaaattggtacatcaccaaccccaatttgggggcgagtgtggacatggattatctcaccgatacgctaaaacgagccaaagagtcgcatgataaaaataccttgcaaaccgcccttgccaagcatttaaatgtagaaattggcatatcgcttagagccaaccgctgggcaggggcggagttttgggaacaagcagggcgagcgtttagccttgatgaactcattgaaaaaagtgaggtcatcaccatgggcggagacggtggtggtcttgatgatttgttaggctgtgccgtcgttggacgcttgcccaccccaaaatacatctacaccgatgataacaatatccgccatgaggtcaaacagtggtgggtgtgggtgcgtgcgtggtgtcaccccatcgccctagaacgcagaaaacaagacgagccacgctaccgagattttgaaaccgatggcgacttggttatcgttgaaaatgtgggcgatgatgtggcagaatttgctgacattgccaaaaaagtctatgacagtggcaaactggataaaatcggtcttgaccctgctggggcagatgatattgtcatcgcccttgaaagcattggcatacccaaagacacgcacatgacaggcgtgtcgcaaggttggaaattgggcggttatcaaaaggtgtgtgagcgtaagattgccagtggtgatttaacccatgcaaatcaaccgttaatggcgtggtgcgtaggtaatgcacgggttaaactgtcaggctctggggtaagtatgagtaaatcagaaagcggtaacggtaagattgaccctgtgattgccatgctaaacgccgtggcactcatgagccaaaaccctgctccaccaaagtcggctgatgatgtgggggtttatttttgacaaaaaaacaaacccactcatagagtgggcagataaaaaacagggcgatgacggactgctggaacagcccaccatccctacgacaaaccgagcttgtcgcaagcgagaccctgccactgtgtacacagcgtggcaagggtatcacatttttaacaaaattgcgataggttgagccatgaaacaagtaaattgtcgctcctgtgggcgattattagcaaaaataggaaactttaacgacttagaaatcaaatgtccacgctgtaaagcgtttaatgttttgagcgtcaagaacgccttatcagaagtcccaagagactcaagcacaggtaatcttgatgagcaaagcacatcacaaggcacccctaccatttgtggggcaaaaacgaatgtttttaaaagaatttcgcaaaattttggataaaataccaagtgatggcgaaaactggacaatcattgatgtatttggcggtagtgggctacttgctaacaacgccaaagcctataagcccaacgccaccgtcatttataacgactttgacggctatactaagcgattagcacatattgatgatattaaccgtttgcgtgctattttgtttgaaatgacaaaagatgtgccacgccaaaaacgcatatcagacgagttaaaggggcgaattttacaagcgattgacgactttgatggttatgtagatgcaagaagtgtcagtacttggctactgtttagtggtaagcaaattaatcacatcagcgagcttaccgaccactcaatgtataacaccgtccgcaccggtgattatgataatgcacaagattatttagatgggctggttatcacgcacgaaagttttgacacgctgataccaaaatttgccgacaagccaaatgctttgctattgcttgacccaccttatgtttgtaccgaacaaaaggcgtatgccctaaaagggtattttggcatgacaaagtttttgcgattgatgaaattggtgcgtccgccatatctattttttagcagtacaagaagtgagctgttagattatatggattatctcaaagactgcgagcctgtcatgtgggagctggttggcgactttgagaaagtgagtgtaaacagccatgtcaattataatgctgaatatgaggataatatgatttttaaattttaaaaatattaaaaattctggcaattaagacttgctattgttggtataacgagcgatactgtggtcatcaagttaataaacccttttaaatcatggagttacaagatgaccgcaatcattaaccaagagctaaacgcccaagcatttgacgaaaaaactagaatttcattgtattgtggcttaattcaagataaattgattgacacaatcaatatgcaagaaccaagtatcgccgataaagttgtcatcgcccatattgaaaatgagctgtctaagttgattaaatttttaaatcaaggtaaatattaaaccataaataacaagaaaaccctgcctattggtggggtttttgcttatcaattattggaaaaccctatgaccaaagcctattcaaccctacaaattaaatcggtaaccgacacggacgatgaacgcatcatcacaggcattgccaccacgcccagtaccgatagggacgatgatattttagagccgttgggggcaaaatttactttaccaatccccctattatcgcaccataatcacagccagcctattggcgaagttatccaagcggaagttaccgcaggtggcattttaattactgccaaaatagccaaaattgacgaagaaggcaagctgaaagaacgcattgatgaagcgtggcaaagcattaaatctggactaatcaagggcttgtctgttggctttaaaatcaaagaatacagctatattgaaaattcttggggcttgcacattaaagaatgggagtggtgggagctgtcaatcgttaccatccctgctaatggcgatgcggtgataacgagcgttaagcaaatcaaagaggcatttagtttgcccctgcaaccaaccccaaatccaccgattaaccccattgtaccaccaccaaccccaaccacaatcacgaaagcaaccccccgtaatggtgcggtcgctttaattttacccaaaaacggagtagcactcgtatgaactacaaagcacaacttgcccaaatcatcgccaccatcaaggcaaaacacgcccaaattggcgagattatgacaaaatcagtcacaagcggacacacaccaagcgatgatgatgaagtccaaatcacggtattagaaggcgaaatcgctcgcctagaaaagaatgccgaacgcctaaccaaactgattaaatcagtggaaaccgccccaaatcctaccgaaatcggtggtgaaaatccagagcaagcggcggcaagtgccaaaggcgagccaattccccaaaacccagagcagaccaaaagcgtgcaagtagaatctaatttgcccaaaggcatcggctttgcgttgttggtcaaagcgtccaccgttgccaccacatccaaaggcggcatcaccactcgtgaagtgcttcaaggttggggtgcccctgacattgtcatccgtgccgccactcaaaaggcggtcatcggcacaacgactgatgataaatttggcaaagaactcattgattatgccaatttaacgggggagtttattgagcttgttcgccaaaaaaccgttgtggataaaatcgctcctctaatgcgacaagtgccatttaatgtcaaaatcccaatgcaaaccgcaagcggctcggttggctgggtcggcgaaggcaagatgaagcctgtgggcaatcctgagtttggctcgatgactttaagccacgccaaaatcgcaggcattgtactgttatcagatgagcttatccgcttttctaaccccaaagctgatacgcttgtgcgtgatgatttggtggcaacggttgctcagttcattgatcagcagttttttgaccctgataaggcagaagctgacgaatcgccagcgtctgtgctaaatggtgtaactgccataacagcaacaggtacaaccgccgataagattgacaccgacaccaacacgctcatcgcccagctggtagatgctggcattagcttagagggggcggtgtgggcgatgagcgaaacccgagccatgcagattagcggaatgcgtgatgctttgggacgcatttattttgagggcatgaatttaacaggcacacgctcgcttaaaggcttgccagtgcacacctctggcagtttgggcgataagattgtgctgattgtgccaagtcaaatcctactggcggacgatggcggtgtggatttttcggtatcaggtgaggcgaccatcaatatgggaacagacgacgccccaaaaatggtcaatctgttccaaaacaacttaactgccatccgtgctgaacgctttatccgctggaaaccacgcatgaccaaagccgtggggtatattaaatatacaggttagtcagataaagccttatttgatgaagccccatgaatgaaaatggggctttattttaggagatttcatgcaaatcacatatttaaaagacgcaccgacaggggcggtgggcgagacgcacgatgtgccagagccacaggcaagaatacttatcattttgggcattgctaagcctgttatcagccaatccaaagcagacaagcccaaacgcaaaaccaaaacaaccaccgaaaatagcgaactggatttgtcctaatgggattttttgatttattccgtaaaaagtcggtcaatgcaacgcctgcccctgcgtggcaaacgctcatccatgaaccctacacaggggcgtggcaaaaaaatgatgagctaaaacgcaccgatttgacccattttcatgcggtgtttgcctgcatcagtttaattgccgctgacattggcaaattacgcatacaaaccaaatcatcccaaaatggcgtacttttaccgaccaaatcacgcacgcacgccattttaaaaaaaccaaataggcatcaaagctggcagcagtttattgaaagttgggtaagctctaaactcttgcgtggtaatgcgtatgtcttaaaacagcgagacatttttggcgatgtgtggcagatgtatgtgctaaatcctgaccgtgtcaaggttttagtatcgggcgatggcgaggtgttttatcaaatcagcaccgataaattatacggcttaaccgataccactgtgccagcgtctgagatgatacatgaccgcatgaactgcttttatcatccgcttgtgggtctttcgcctttgacagcatgcggcattagtgtgggtttggggctgtccattcagcacacctccgctacgctctttggcaataactctcgccccagtgggattttgtccgtgccatcagacatcagcaaagagaccgcccagaaagtcaaatccgactggcaagccaattactcaggcatcaagcgtggtggcattgctgttttgggcagtggggcaaaatacgaacccattgctatgagtgcaagtgacagccaagccattgagcagcttaaaatgagtgggcagaccgtctgctccgtgtttcatgtgccagcctttaaagtgggcatgggcgagattaaggcaggacaaaaggtgtctgacttgaacgagatttattattcagactgtctgcaacactacatcgaggcgattgaaaacttgcttgatgaacaccttgaccttgaaaaaggcgtggagtgtgaggcggatttgtccccacttatccgaatggatagcaccagccaaatggcgtatctcaaagaaggcacacattcgggtattttatcgcccaatgaagcccgtgccacgcttggcttgccgcctgtggtcggtggggagtcgccactcatgcagcagcaaaattacagtttagaagcacttgccaaaagagacaacagtgccgacccttttggcaatgcacctacgccaaacaagccgaccaaatccgccaaagcggtcaagccacgctaccgagtgtatgccaccattgacaaggataaatcatgagccaatttgctacccttgacgaggttaagcaccatttgcgttatgacgataccgacagcgatgagattttgacgatctatttacaatcagcacaaacagcggtcaaaaactacatcacagatgagattaacgatgacatgctgcctgctctaaaagttgccacgcttttgctggtcggttatcttgatgacaaccgaaacagcgagaacggggcagaatttggtaactatctgcctgcccctgtccgccaaatgcttgccccttatcgcacgcccactttttaactttttggggaaacaatgaaagccaaactaatccactccagacttgaaatttaccgccaaagtaccagccgttctgccacaggggcggttaagatggatgaatgggagcatgccttgaccgtttgggggcggtttatccgcttatccgataaggacatcatcgcagggcaggcacagggcagccaaatcaccgcaagggcaacaatccgccatcgcacggacatcagccatacgatgcgagtgcattgtggtgatcaagagtatgagatagtcggcaagcctttggctgataacaagacagggcgagagtatttgacgctcatgttaaaggaggttcttgatgataggcaaaattgaagttttgggcttagatgagcttgataaacagtttgctaaacttgatgataaagttaaagataaagccctatccaaagccctaaatcacgccttaaacccaatacgaaaagatgccaaattttatgcgtctgttgcccctgagccacatacgatgattgtctatggcggtcgcagggttgttgttcagcgtggactgctccgctccgccattcgtaagcgtaaagtcccaaaacgagaaatgggagaacttggcggacacggcgtggcgatgggcatttatgttggcaaaggcacaaaacaaaaggaatatccgaattactggcattttgtggaatacggcacaagtcaaatgcctgctgtgccatttttacgccctgcctttgataaaaatgtgcaggtcgctgtcaatgcttttgcaaaaaccttaaaagatgaaattgataagattgtcaaatgaacgccagccaactcatatatgaaaaattatcagcattggtaaataatcaatgctatcccttatttattccagagcatagcccaagcaatccgccttatattatctaccaaatcatcagtaccgagcctgataatactttggatggcatgacaggtcatgaatgggcaaatgtgcaaatcgatgtttatcataacgactatgatgactgtttatcactagccgccaaagccatcaatcaattagaccaaatcaaaccgtccatttatcacggtgtgcgatatatgcgtgataatgagagcggattgtttagagccatcattgaatacggtttttggcaaaccttagaattttaatttaaaccgccaactaggagaaatctcatggcaaaagttgtagaaaatcttgctgacagcttttttactttgcatgtctcagcagacggtaacgaataccaaaaaatagagcatttgcaaaaatgcgaccacccaagtgaagagaaggtattggacgatgtaaccgccaccgatgaccgccgtaccgtcaaagcccctattgattttaaggaggagagtgagattgaatttgaatacactcttgaccccaaagacaccacacatcagctactgcaaaccagttttgagggcggtaaagagttgcattggcagttaaaatatgtggttgccacaggcgagtcccgtcaatttaagggcatcatctcaaagctgaccaccgataacagcgaccaaaaaaagaaaatccgcaaaactggtacaattaccatcacaggcgatgttaccaaagttacaggttaattaaataacccaaacccacaaaatcaagccatttaatgataaatggcttgatttattttaaataaattaaaaggtatatattatgagtaaagtagcaacattagcaactgaattattggcaggtctatccgccatcaatgagccaaagaaaatcaacatcgctgaatttgatggcgacatttatatccgtcaaatcagcgtgggcgaacaagaacaaatcgccaaacacctagaaaaggaaaaaggcaataatatggcgttgtcttttatctttggggtatgtgatgaaaaaggcaatcgcttatttagccttgatgatttggacagcattaaccaaattaattttaaggcgatgttgtcagttattaaagaaatcaacaaattaaatgggctagatattgataccgaagaccacgaaaaaaactcatagccgacaaaagtcggctttttttatttaaattggcaggacatttgggcaaaacagtgggcgagcttgaacgcacaatgaccgcccacgagtttgcccagtggcgagcctatgaccgccttgacccaattggcggttatcgtggcgacatacaatcggcggtcatcgcttgtgccatggcagggggtaagccgtctgattatcttatcattgacccaaatcccatgacggacgaggagcgagaagcctatgagctagaacagagaaaagcagagctacaagcccaaatcgagcgaacgcttgcgatgttttctgccataggttgaaaaaagataggtttttgggtatgatacggttgtattatatcccaagggcttttttatgcgacctgttttggctttattgtcgttgatgtctttttctgtcgcccatgctaatcagccatcaaccaatgacgagcttgatgatgccatcaatcgtttgatggctaatcattcgcccatttcattcaccaaacccaatcttgatacttatcaagaaaatgttgaaaaatattacccaaaccaagatttatcagacaagccaaatgtgcgtatcggcatgactgcttttgatgttagatataacagcaactggggcgaacccagcgaaattagcaccattatcaaccagtttggcacacaagagatttggatttatggcaaatgggataaactgctgcatttaaccaataataaagttactcacattcaatattgacaaattagaccattttaaggcataattttacaaaatcaaaattatatttagacgctgacggcttgtgctgttcagcgtttttttattattactttataagaaatcatcatggcaaaagttttatcacgcttagacatcttgctccacgccaacaccgccaattatgtgcgtgagatgaaaaaggcgaccgacaagaccaaaaaagaattaaagagcgtggcggactatggcaagctcgtgggcggtcagcttggtatagcttttgccactttgggcagtgcggtgagtatctcacacatcatcgccactgccgaccaaatgcaaaatttggcaagccaaatccgcctagctacgagcagcaccgagcagtttcatgccgtacaaactgagctaagagccatcgccaatgaacagcggtcaagttttgatgcggttgtggatttgtattcaaactcacagcggtcattgtccgctcttggcaaaagccagcaagatgtcatcaatttcactcgtaacatgactatggcgatgaatgttggtggcaggtcagcacaggctcaagcggccgcattaacccagcttgggcaagcgttggcgtcaggggtgttgcgtggtgatgagtttaactcggtcgccgaacaagcccccattttgatggatttaattgccaaagagatgggcgtaacatcaaaagccatcagagatcttgccaaagacggtaaaatcactgccgatgtggtttataacgctgtggcaaaagccacggacagtctgtccgccatgtccgctaagatgccaaccacggtatcacaagccctacaagtcattaaaaacgagtataattatctcattgatgacatcatgaaccaaaacagcatgatgagccaaaacattgccaatgctgccttgtgggcggctgagcattttcgcacgctggtcagtgcggcagcgatggtcggggcggtatggcttggcatcatcgctaaaaactctgccttagtaacatcatttgccacactgacaggggcaactgtggcaagcaccaaagccagcgttgccaacgcatttagcgtacaagggcaaatcacggcttatcaagtcctagaacttaaaatactgtcgcttagcactggcttaggctttaagattgtgaagaccatacaggccacaacaaatgcggttgcctatgctcgctcattggttggtttggcaacaagttttgacagaaccacgctcgccaccaaagcggcaacgcttgcaagcataggctggacgaaaaccaaacgaggggcgataggcgtgggcattcttgccactcgtaccatcacaggcttgggcggtgcgtttatgtcgcttgggcggatcatcaccgctcaccccattcttgttttgactgccgtcattggggcggtcatcgcacgcactgaaggactaagcggagcaatcgagtcgcttggcgatgcgtttagtgtgtcaggtgtgttggcaatggactttgttggtggtgttgtggacggactggggacggcttggacagtaacggctaactactttgacaatcttattggcggttcggctaacgccacaagttttgcccaaactgcctttgggggattttttgcagggacacacaaaggctttgttggtgtgctgcaaattaccgctcgtgtgtttgacctagcaggggcgagtgtggttacttttacgcagtatgcgtggaaaaatatcagctcgctcggtactgcaatcaccaatgtgttcaaaggcattggtaattttatcgcatttgttcttgagggcgttattaacgatgttacagctaaaatcaactttgttattgatggtgtaaataccatctctggcaaggttggcggtggcacggttgcactgcttggacgggtgcgaatcggtcgcatgaattacggtagtactgattttggctttggaggatttaccgccagcgtcgccaaaaataatactcactacctagaaaaccaagtggtcaatgcctatgacaaagtgcaaagctctgccaaacaagcccatgatgccaatcttggtttggcagggtctatggctgatgtggcaaagggtgcaggcaaagcctcaaaagagttggatgacaattacaagtctcagcttgccgaatgggaacgagctaaatgggatatgagtacgccttttatctcagaacttagcaagattgaatttgaaatcacatcggtaagcggtaagtttcatcgtgccagcgatgacatgaaaaataaccttcgcaagttggctcgtgaaatggacatcgccaaagccaattttgagctacaaggcacatatacagaagccatgcgtcaaattcacctgtccaatgctgatggcagtaaatacctagaaatggcgtatgatttacaagacaccgccaacgccctgcatcttgctgatgaagagcagaaaaagcagattttaagcacgctcgccaccttagaagctgttaccaaggatcgtgaattacaaaagcaaaccagagacagcagaaatgagcttgccttacttggcgtggaagaaggtatggcacgagagcttttcgccattgaacaacagcgtactgaaacgctggggcagtacaatcatttgctaaaagatggacacactgagcaatacaaagtgatagaaatggcggtaaatgccttagaacaagaacaaaagaaaattcttgttaccaaagaatatcacagccttgttcagtctttaaaaacggacgaagaaaaacgccttgataccttaaaatcacagcttgatgtgctaaccatgcacagtcaggtgatgggggcaaatcttgacattgagcgagccaaacagctcatcagtcaaagcgtgggacttgccacacctaccaatcattatgacgagttaaacgccaaaacagcaggtcagtacgccagtctagacacaggattacaagccctgctggataacgagcgactgaccgaagaagagcgaatcaaaatcaaagaatggggagcgagtgagcgagccaaaatcgaacaagcccatagcaccgccatgaacagcttgatacttagcgacagcgagaatatgtttggctcacttgccagcattgccaaagacggcttgggcgagcagtctcggctataccgtgcgatgtttgccatgcaacagggttttgcgattgcacaggcaggtcttgctatgcaacaggccatcagtcaaggtcttgccaaaggctttcctgatggtttggcggatatggcgttggcggtaagtcatggtgctaaaatcatcagtgcaattaaatcggtggtcatgcccgtcggtcaagcccatgacggcattatgagcgtgccaaaatcaggtacttggaatcttgaaaaaggtgagcgagtgctaccacggcatactgctaaagcacttgatgacaagcttgataaaatcggcacaggcggccgccctgtgaatgtcgttatcaataactattcaggcgaaaagaccgatgtacaacaaatgccaaatggtgatatgatggtaactatcggtaaaatgattagtcataccgttgatgcaaaacttaatcagcgttttattcaagcacgccgacaaggcggtgagctttatgggtaaacaagaatttaatttttatcaagacaaactcaaaatgtaaaccaaatcacacaaacctaccaatattggtaggttttttgttggggtaaaaaatgaaaaccttcacttggaaaatgaacatgggagcgtccgccagtgttcatcatgctgttagcaaaacccaatttggtgacggctatgcccagcgtgtcagtcatggtattaacaatcagcgtatggactggtcagggtcaaaaacaggcgactggcaaacggtcatcttgcccatcaaaacctttcttgatgaacacaaaggtgtgataccgtttttgtggacaaacccgcatggacaaaccaaaaaatatgtctgtgaaaattatgaaatcagtcagaaaaaaggcaacttttgggagatcagtcttaagtttgagcaatcaaactcagacggtagcagtgtgccgttgcttgacttcggtaatcaaaacagcggcacaagcacgccaaatgtgccgcagtctgcattagatgacatcaataagaaaatacaagatgagatcgagcgcagtactcaaaaagatgatgcacatgacaaagcgattcagtcacttaacacgagcaaaacaagcttaagtaaatcgattgatgagattaaagagcagttagcaggcgtttcatcagtgcccatgtctgtcgcatgggatagcatcactggcaagccgtctagctttaatccgtcgtctcatagtcacgctatcagcgacatcagcggtctgcaatcgctgcttaatgctaaagcaaacagcaatcacagtcatgcttggaatagtatcactgataagccacaaagctttacaccgtcatcccatgtgcatcaagcaagtgacatcgctgatctgcacacaatattgtcaaaatatgctactaaagacgaaatcccgcagatcaatactgacggattgacgattgatacatcaaacttagcaacaaaaaccagtgttgaaacacttgcaaataaagtaactgaagcttcagaagcgttaaaatctgaaactaagttacgagctaattctattgcagctattgacagtaaaatcactactgaagttgatcgcagctctaagaaagatgcagaacatgatgatgaaattgcgtcattaaaacgcacgaaagctgatctatcgcacacacatacaatgagcgaagttactgatctaagtgctgaattagagcgttatgcgttaaaaacagagctaaacaatatcagtgttgatacttcacatttagctactaaatcaagtgttaatgagctgtctgaacaaatcgctacgaaagctgatcaatcacacagacatacaattactgaagtctccgggttacaaggtattttaaacaataagttaaattcaaatgcgtctgctcgttctgcccaaaaactgacaacaccacggcgtattaatggcattgcatttgatggtacacaagatattactttacctacccctactgccaatgtatcttggtcagctatcagcaataaaccagcaaactttacgccatcagcacatagacatgcgattagtgatattactaatttacagcgtgaattagataataaagcaccaagaaaccacagccacacttggaatagtattactgataagcctacaacactcacaggctatggtattacagatgctatgcggacagacacagattcagaaaccacaggattaatcagtattaaccgtgctgatagctatatacaaggtaaacaaggcagtgtgagacgctggtatgttggtagtgggtcatcatcaaaccataatgtccagcttagcaatttaacctataacacacagcttgagcttacaaataacagaattaccagtaacaaacctttatatgtaggtacaagacgggttttattagagggtgatgaaacagcatctacaaccgtccaagtaactaaccacccaactattactttaacccttggtgcaacattagagatgaccacttttgtctattccaatgggcgtattgtacatagattaaattataagaatatgacgaaaccagcacttactgcactaacttcatctagttctcgtaccaaaacactgacagtaaacttacccacagcaatgccaagacaagttgtgcaggttaatgctcacttctacgacagtgggtacattggttatgcttcttctcttttggctgtgtggaaactaagcgaaactactaacagtacagtaccactaaaaatatcagatacaaatagttctagtaatttttcaggtttttcagatttagttgttactatagagggtttttaatgcaccatattaaattaattgatgacaagggtcattttgaatttattcatgaagattttttatatctatatagcgatacagcagattttattgcgattgctcaggaagattatcaaacttatgttcaatctgtaaaccaagaactcatctaccaagatggtaagattattagtctaactaatcaaatatctgctgatgagataaaacaaacaaaccaagagctggtatggtcagatatcaaagataaacgaaccaagcatgcacattcaggtgtttatattgcttcagtagataaatggtttcatactgacgaatctagccgtattcagtatttagcattaataacattaccaagcttgcctgataacttgcaatggaagactatggataatagttttattacattaacaagaccgttactcactgaattaacatctgctatgttaatcaaagaacagcaagattttatgaatgcagaacgacacaaacagctgatgatgcgggtagataatcctttggattatgactactcagacggatggagtgctatttatgcgtagaaaagtttatttagcattatataaagggagagctgacaagttctcttatcgtttttatgatgcagtgacacgctttttcacacggggtcaatactcacattgtgagattgcagtacacattcacaacaacatttatcaatgctattcatcgtcaattcgcaatggcggtgtgcgtcgcaaatcaatgatgctcgatgacaaatgggacttaatcaagctggatattgatgagtcgcaaatcagacatttttacgatgcgacaaaaggatcgggctatgatctcttaggtgctttaggtgttgttttgggattacggcaacatccacacaaatacttttgtagtgaatggtgctttgaagcgatcacaaacaagcaaaacggctggcggtttagcccaaatgatttatacgcaataaaatcaattttaactcgacgacattaatgtcggcgacatacccacagcccttgtaaatcaagggcttttttaggagcaaaacaatgagtgaaacaactctaaccgaactatcacgcaccgaggcacaggtattacagagctttatcgcacaggtggacttttggaaaaaccagcatggcgataaagctgccaccattgaagtcatctactaccctgaggatgacggctttgaggtggcgaacggtgagcctaataacggcgtgctaaaacgcaatcgcaccacggcgtttcgtgctgaccttttagcgtgggcgtccaatcaactgcgtcaactacaaggctgggacaacagccaaacggtcaccgagtttagcttgtcttataaaaatgaccgttatggggtgcgtgctgcccttgctagtgaagccaaagccgatgatgcaaaagcaccaaatgaagcataacacaatcaaaaataaggaaagtaaatttccttattttttttatttggagctaatatgccattaaacagcgactttcaaaaacccacagtagacgggctaattacgctctttgagcttgacgcaagtaaactgggggctggcattttacgctttcacggtcataaccacgagcataatgatggcgtgattgtctttcgtggcaaagcgtgtctttccccaagccctaaatgtaacagggcttgaaatgcgttcagatggcagagcaagcacaccgaccctaacccttgctaataacattgcaggggtacaaggggcggtatctgcatactgtttgcagtttaacgactttgcaggggcaaaacttaccgtcattaccacccttgccaaataccttgaccccatcaattttgacaacggtaaccccaccgcttctgatgaatgtaaagagcaaatttggtttgttgaacaaaaaacatcagaaaatgcccaacaggtaacctttgagcttgccaaccccattgatttggagggtcaaaaaatccctgtacgtgagattaccaattactgccactgggcggttgtgggtaagtaccgtggcgaagaatgtggctatacaggggtggccatgtttgatgaacacgacaaccctaccgacaaccccatcatggacaaatgcggtgggcgtatgaaatcgtgcgtgtgcagatttggcagaaataaacctttgccgtttggcggctgtcctgccagcagtttgattggctcataggaattaagatgaaattaaccaaacaattaaaagccgacatcatcgcccacgcctttgactgctaccctgctgaatgttgtgggctaattgtggataaaaagtacataccttgcaccaataaggcaaccgatgatgagcaatttatcctttgccccaaagattttgcccgcgcggaaagcatggggcagatacaagccatcgtccatagccaccctgacggcggtgtgttgccgtctgatttggataaattacagattgagctacatggcgtgccgtgggtcatcgtggcggtatccaagcaagattatggcgatgagcctgcctttggcatatatgaaccgtgtgggtacagaccgccgcttttagggcgtgcttatatccacggtgtacaggactgttatagcttggtgcgtgattattacagccgtgagcttgatattgatttgcctgattttcaccgcagagatggctggtgggagcatgagaaccatgaaccactttatgaacagaactttgaaaaagctggctttgtgactgtggataagtctgtgggtaatttacaaaagcacgatgtcatcttgtgccgtgttggtcggacgcatcatgtcaatcatgccttgatttggcttggcgatgatggagcgttaaaaagcgaaaccacgcctgattgtgtgggtaatgccctaatcctacaccacccctacggacggcagtccgtgcgtgagatttatggcaaggggtgggcagataggacggtgatggtggtgcgtcatcaggcattaagtcaaaccaacctgtaactgcttacccaatttggcaaaagcattggcaagggtatcaattttggtggcatgcgacaaatccacaaggcgggttacctgttgggggatgatgcccattcttttggcaagctcggcttggctgacattttggcagagcatttcattaagcaataacacttttgcccatacagacggtggcaggctaaccaaatgctcgccatcttgggcttggcttggcattggtacggctcggttatcttcaaaataaaattccatggcaaccattaaggcatcttgtgccatctctaaggcttcatcgatggtatcgccttggctgatggcttctggaatgtcacgaaaagtaacgcaaaagccgtctgtatcaggggttagggtaacaggatagtgcataaattctctccatttggttagggtttgcaattttgggtaatgctaggggttaccccctagtctgatgtctgttgtgaattggcgtttagttgctttatgatggctttggctacattttctttaatttcggtgtgccttggtatggtggtttgtttgccatttaaatacactttggtatgttttgcaccctctttaaagactgcccctttttcacttaacagaccaatcaaatctttacgcttcatgattacccttaattgccatttgatgtgcctattataaacaaaaatgtttataatatcaagtattttatcaacaaaaaagtatattttttacggaatataatcatgaaaaccatccaactacacggcattttagccaaaaaattcggtaaatcttttaacttggcagtgggcagtaccaaagaagccatgcgtgcgttatgcgtgcaacttactggctttgaagcgtttatgatgaacgctcataagcaaggcctgcgttttgctgtatttcacgataagcataatgtgggcgagagtgagcttgacatgaaccacaccgctaagattatccgtgtcgtgcctgtcgtggaaggctcaaaaaaagaaggtgttttagaaactgtcatcggagcggtcttggtcgtggcaggggttgtggttacaggcatgggctttgctcctgcgggggcggcacttatcggtgcaggtattggccttatggtaggcggtatttctcagatgctcatgccaaaggtggacgcccaagacaacaaccaagacggcaacaaagccaacaagggctttggcggagcagtaaccaccatcgcccaaggcaatcctgtgccaattttgtacggcgagcgagagattggtggctttatcatgtcagccagtcagcttccagaagacatgttataaaaaataaggataagaaatgaccattcacggtgctaaaaaaggcggcggtaaacaaagacagcccatcatcgcccctgactctgctcaatccaaaacttttatcagtatcatgtatggcttgggtgagggtgagattgcagggcttgcagatggctataagtcagtttatcttgatgatacgcccctacaaaacgatgatggcgagtttaattttgcaggcgtcaaagtggattttcgtgctggcacaaatgaccaagagtacattgatggctttgctgatgtggcaagtgagaccaatgtgggcgtggagctaaaacatggtacgccgtgggttaagtcatttaacaatcttgaccttgacgctctgcgtgtgcgtataaaatggggggcattgcgtcagcagaaccgtgaaaatggcgatgtggtcggcgtaaagattgattacgccattgatgtcaaaacggacaacggcggctgggtggaagctctaaatacatccatcaatgccaaaacatcaaacgcttatgagagaagccaccgtattgatttgccagacgctcaacaaggctgggcggtgcgtgttcgccgtatcacacctgatagcacctccgagcttgtcagtgatacaatgtacatctctgccatcaccgaggtgattgacttaaaattacgctacccaaacaccgctttattggggctaagatacgatgctgagcagtttagcaatgtcgctaaaatggcggcccgctgtcgtggtcttattatcaaagtgccaaccaattacaaccccatcactcgcacctatgatgggctgtgggatgggcaatttaaaatggcgtacactaataaccctgcgtgggtgtattatgacctatgcaccgccgaacgctatgggttgggttctcgccttacagaatacatgattgataaatggagcttgtaccgcttagcccaatattgtgaccatatggtcgatgacggcatgggtggacaagagcctcgttttactgtaaatgtctatattcagtcggcagatggtgcgtttgagctgttatctagacttgctggcgtatttcgtgccatctcctactgggacggtaccagcattgtgctagatgctgacattccccaagacagcatttacagttttagccgtgctaatgtcattgatggtatttttgaatatacaggcacacgagcaagagaccgccacaccgtcgccaaagttgcgtgggataaccctgccaaccattttaaaaccgaatatgaatatgtcagagatgaaaaagccatcgccaaattcggtgtgcgtgtggcggacatacaagcgtggggctgtacaagtaaaggacaagcacaaagggcaggactttgggcgttaaaatccgaacagcttgaaacacgcatggtaacatttaaggtggggctagatggctatatccctgcccctgctaaagtgattgaaatcagtgatgagctgtttgcagggcgtgccacgggcggtcgtgtgcttgcgattaacaaaaccaaaactgtgattacccttgaccgtgccattactgccaaagctggcgatacccttgtaatcaatggcgatgatggcacaagccaaagacggcaaatcagcggcgtaaatggcgataatgttaccgttactaaaccctttagcgacatcagcgagcaaaatgtttgggtgctagacagtcaagatttagcaacgatgaaatttcgtgtgctgtcagtaaccgctgatgacaatcatgaatttaccatcaccgccgtgcagtataacccagtcaaatatgatgccatcgatacaggggcggtcgcctccgagcgtccgattagcgtcatcaatccaactgtgcaagctccgactaagtcggttaatctgtcaagttatcacacggttaatcaaggcgtaacggttaccacgcttgtcattggttgggagcaggtgacaggtgcggtcaaatatgccgtggagtggcgtaaagacaacggcaactggcaaagcctgccaccaacaggcacaaacagcattgaaatcacaggcgtgtacgcagggcaatacgaagctcgtgtaaccgccatcagtgcttttgggcaagcaagcctagcaacgcactcaaatctgacgcagatacaaggcaaacaaggcaaaccgccacgccccattaacttcaccgcccaaggggtattatttggcatgaatttagggtggaatttcgccaaaggctcaggcgacaccaattacacagaaattcaagttagccccgacggtcgctcaaatatcgcaacgcttggtacattcgcttaccctaccaataagcatgaaatcacagggctacaaggcaatttgacccagttttatcgtgctagaattgtagataaactgggcaatacaagcgattggacagactgggcaagtggcacaacatcagcgaacgctgataaagtgcttgacatactatcaggtcagattagccaatctcatcttgaccaaagtttacgcacgccaattggcaagattggcacaattgaaagcaacatcagcaaaatcaatgttgatttgcccgagttaaatcaaagcattgctgatgctcaaagcacgcttaatactgctgttgctagtatcgacacagagaaaaagcgactcagtagtgcgattgttgatatcaatacgcttaagcagtctaataatgccaaaacccaagaaatcgctaatcttacgcaaacggtgaacggtcatacctcacaggtgcgagagcttggcgtaacaacaggcgatttatcgcaaaaatacagtcagcttaaaaccacaagcgacacggcaaacagtgaaatcacggcgattaagcagacccaaagcggacaagccacaagtgttgagcggataagaagcgagcttgtgggtaaagcaagcagtgctgatttacaaaacatacgacagactttagcaaatgccgacagctcgctaagccagcgtatcaacaccttgcaaagcgactataatggcaataaagcgggtgtggcagttcagctaaaaactttgagcgataaagacaatgctacggcaagtcaaatcagccgcttaaacagccaaatagcaaacaaagcaagcagtgctgatttacaaagcgtgcagcggactttagcaaatgccgacagctcgctaagccagcgtatcaacaccttgcaaagcgactataatggcaataaagcgggtgtggcagttcagctaaaaactttgagcgataaagacaatgctacggcaagtcaaatcagccgcttaaacagccaaatagcaaacaaagcaagcagtgctgatttacaaaacatacgacagactttagcaaatgccgacagctcgctaagccagcgtatcaacaccttgcaaagcgactataatggcaataaagcgggtgtggcagttcagctaaaaactttgagcgataaagacaatgctacggcaagtcaaatcagccgcttaaacagccaaatagcaaacaaagcaagcagtgctgatttacaaagcgtgcagcggactttgacaagtaaagagcggtcactaagccagcggattaataccgtgcaaacaactctaaacggacagacagcgagcattcagcaacacgctcaaagcttgaacggtttattggctcagtggacgcttaaagtgcaaagtggcggcgtggtctcaggcattggcttagcaagtaataatggcgtgtctgattttgcggtgatagctgataagttttatgttgcaagtccgcaaggcgataaaaagccgatgtttacggtaaccacacgcccaacgacactgaacggtacaactgtacctgccgtggtgtctttgaatggtgatttgataggcaacggtacgatatcaggtgataaaatccgagcaaatacacaaatcactgcccccaatatccgaggcggcagtatcaacatcggcaataattttagtgttgataatcagggtaatttaaacgcaaactcaggcgtatttcgtggtcaagttttcgctgataaaatcacaggtcagattgatgttgaaagcttaaagtccagtgcggtggcgttggggtatgatacatacatctctgataattatcatgccagcgaaccacatcagtttgataaaacattcaaagcgtcttatccgtcgcatggttctatcacgcaaagtttggggtttaataatgaaaatattggcagtatcatgtatgagatgagggtattttgtaaacgagcaattactgtcaaacaaaagctacacacagttgacgataaattatattgttatgtcaatggcagttcggcgtttggttatcattcggtccacaatggctacgacgatgaagatgaaataccgcttcctttcggtcgaggtcggattaatacagaaatcagcctaccgctaaggcaaggtttaaataccattcaatttgtcttaaacaactcaggcggtggtatttgccaagtaattctaatcggcgatttcattgacaacaacatcattaaatttgcataaaaaggtgacatatgattgacacgcaggggcttcatgccccttttttattggagtagatatgccagaaaaagacccaacaacttacacgctactgacctacatttgggtaggactgctcgccacgggcggcggactggtggcgttcatcagacggcttaatgaacaaaaaaaaccagagcgacttcgtgttgtgttcgccaaactcacaggcgagcttatcatctcaggctttgcaggtttgatcacgttttatctgtgtgagtttttggaggttcaacaattactgacggcggtgctggtcgctgtcagcggtcatgctggtggtaataccattgaccttgttgccaaactcattgaaaaacacattaaccgaaaaactggattttaatgatgaatgaaccaaaccataaacttaattagaatgatgggttttttaaatccgattattacataaattcacatgagccgccccaaatggggctttttttggagaaaattatgagtagtatcaaacacattcaaacccaaattggcacagccgctgatggtatttggggcgataaatcaaaacaagccttaaaatcggcgataaatggcggcaagattatcacaatcactaaaaatatcagcttaaatgagttattagctagtaatacagccaaaaaacacaacattgacaacacgccaagccaaaccattttacaaaacttgattgacgccagcgtaaacctttatcagcctgtgcgtgagattttgggcgtggcgataataattagcagcggttacagatgttctgcacttaataaagcagttggcggctctagcacttccgcccacatgtcaggatatgcgattgattttactgccccaaagtttggcacgcccaaaatcattgtaccgcatattgtgcgtaagcttaaagaaaatagcattgggtttgaccaagccatcattgaatacccaaaatcgccaaggtcttgggtgcatttgggctacaagcacccaagcggtaaacaaaggggcagtagttttgtgattgggtgattaatataaattgccccagttgtgctaactggggcaatggtgatttgatgattacataaagcgtccgttttctgcaatcagcttattaagctgcccctgtccgcctttgcagtaaaacagatatgcttcgtggtctggactatatttatagatttcgttgtagccgtgactgcaacggaatttttcaattttgaaactcttgttagctttagcaagtgtttcaaagatttctgatgcttgtttattgctgatttgtttagcttgatattgctcaagcacaattgagcagatttcatcaaatgatttcttatcaacatcaacaccgtccgccagcttggcgttgatggctttgatttcactaatgtgaagaaaagctgtcaagttttggcggttttggctgatttcaatcatttcaatctttttcattttgtgtctccagtttattaatttaagattttgttcatcaagctttcttgtcttgatgtgtgtattatataatcaagacatatataatgcaagcattattttataaaaatattcaaaaagtttataagttattgattttgattaagattataatgattacgcagtatgtctttcatcaaagcattaaaagattttgtttcattctgcaacgcttgaatgatgtcagcatctttttcattatgaagttgcaatgacttgtttgttgtgtgcttttttcgataatttgcatttgcacgcaatacatagtcgggggttttgtttttgctcattttatactcctgagttgacaaaaatggcgggttgccattttattttaaattctttggcttggcgtgtgccgtgccaatgcccatgccaatgcccacgacgaatgtgagggcgttttttgcttgtttgtctgtgcttaccttgctctatctgctcttgatagtgccgaatttcaccgcccagtcttgagccgacttcataaataaatggctcacttggtgggataaatacacccgtttttttatttgtttgatatttgggcttgtctaaattggcacggctgactggctcgcccttgtgcataatttcaggctcggcaacgcatagccaaagcaggtagggcagcaagactttgataagttcatttgagccgccgtcgccaattttattatcggcgtaagacagcgactgcatgaccgtcatatcatcatctaagataagcgtcaggggcaagtaaatatcatcatcactgtctgtgtcgatgataaaattaattgctttttgtggttttgagttgtactcaatcaaatcatatactgcccaaaaccccttgatgtgccttgttttgttgtcttgcgtgatggcaatcttggcactagcgatatcaagatatacgcaccattcgggcaggtttaaaaaaatgctggtgggcgtatcgtcagggattgccttgctgtctttgatgatttcatcatcaagacaataaatgccgagcgtataacgccaagtgccgaacaaatacaactgattaagcgtttttagagcgtttacgcctttttcgctaaacgggtcgcttcttgtctgctcataagcgatggcggttgacatatcaagcagagatgcgtgttgcacgggaaaaaacgcaaacttatttttgctcgcaaggtaagcttgttgcatttttttatagcacgctttagcgtttgtaaattctttattgaatttttgcattcgtgcaatggtatggtgcattttcaaactcccaaaactccatatttaaaaaagcagttttaagacttgcttaggtcttgggattaaaccaaatcagctttacaataaacttctacattatagtaatcagcatatgaatgttctacaaactgatcacctgtgtttgttgtgtatacaccatcttcttctgtgtagctgtcatatgcttgaccgcctgcatagcttagtcgagctagtgtacggtctcctttgccaaaatattcatcacagatttcctgcacttctttgacaaagtcatcatcatctaaaggctcatgattgattgagtgttggctgtcaggtgtgtgcggtaattgtaagtacaattcatcacctgcttcagtatttgcagtcacggcaaattcattgattttgatattaagtagtttcattttgtgtctccagtcgctcagtagcgagttaagttaattggattttatcaagctttcttgtcttgatgtgtgtattatataatcaatagatatataacgcaagcattattttataaaaatattcaaaaagtttataagttattgattttgattaaattaaatgcttttaaagattaaaaaagatgatttttcagaacatagcataaaaccccagccaaatgctggggttttagtagacgaatggtagactgcacaaatgttgttatatagcttttagtattattatttattgttatttggtaagacggtagtaaaataacttattgattttattatgaaatattgctatttatcgctataagcttatttcataatcataattatgagtcctctgctctaaccaactgagctataggcccaaatttggataagaaaaaaaccaatgatgaatgtcactggctcttttaaatttggtggggacggagagactcgaactctcacacctctcggcgctggaacctaaatccagtgcgtctaccaattccgccacgtccccaagttgtttttcaagcgatatacgcattcttgatgttgggtattatatagatttttacaattttggcaagcttttttttgataacatgataacaatttcata

SEQ ID NO: 27 - DNA, 48328 bp, Moraxella catarrhalis
  unsure 2850: a or g or c or t, unknown, or other
aatgggcattaaatggaataaaaagcttagcattgaacccattgctgataagattgacgccacttatcgcaaatttgccattgactgctataacaatgtcatcgccctaagtcctgtgcgtaaagggcgttacaaaaatgcccatcatatcagcattggcagtcctagctatgccgagacaggcggtggcattgaacttgtcttaggtctgccaaaacacacctacccactcatctacattcaaaacaacctgccctatgcgttgcgacttgaacacggctggtcacaacaagccccaacaggggtgtacggtaatgcctttaacagtgccatcgccaatttgggttaatcaagctgtctttgatatgcacgcacagcatccatgatgagctgattttggggaatatttaagcgtttggataagttttctattaagctaatgtcatcaatatgtagctttaagcctttggttttaaagccacgcttagcatcagagtcagcggtacgctgtgtttggctttttggggtgcttgtgatttttggcatggtttaatctcctaggttgtgcagtcgcaagccccacgatgtcgctgtgagacttgcgttgtgttgattagagcttgacttaactgctagattttagtaagataatcaacacaaggataattgcgatttgtatgacagttttcatcgctttttccttctgctagtgagtgtacagtagcttggttgttccagcaaccttgctaccacctccaagactgataataccttgtcttgttggtgtatattgtaagctaaccaacaaataaagtcaatcattttctctaaaatgtttggcttttttattgccttaaaaaagcaccctgccatgtgtggggtgtttgtgctgataatccattttgtgtaactaacttgaaagttagaccattttaaggtatgattttgtcataataccaaaattctatcaaccgcctatctcttgtagattggcggttttttagtaagcaaaaacccagtaacggcaaattactgggttttttattttcaattttcgacattgaacaggatttattatatatgtttaataaccacaagtcaaattcacaattacagataggtggcaaaatgacttcaaaaggtgcagacaaagtaggcttaatacaagcggtggcgttatgcggattttcgttagccagtatcatactggcggtgagtgctttgattttggcattaaaataaattgggataaaccgcccttagagcggttttttttattggacaaaacaatgaacagttttcacattatgaacagttttcacattgaacaaacgctactgacgcatatcaaagcctgggagtattttgatgatgtccccttagccaaagaaaaccgaaactttaaaccccctgatggcatttggggcagggttacaattttgggtggtgtcaatcaagtacgcagtatcagcgataagcctgatattatgcaacaaggcacgctggtaatacagctgttttgcccacaggatttaggcacggtggcgattaagcaaaaggcggatagcctagctaatcatttacaaacaaggcggtttggtaggcttgagacactgacggcaagtatcatcaatgcaggatttcatgattactaccaaattaatgtaagcgtagctggagatactactaatgccaaaaaaccgacaccgacggctgttacagctgtatggtgaaattaatgaacttggggcaatattagacgccccaaaacccaaagatattcacccacatgagtggatattaatgaaagaccaactttattatatgcgtcagtattaccgagtgttaaaacaacgaactgatgatacggagaattgatttatgtctagtggagcatttgttaaaacggcgtatgccaaacaaacaggcgaaaccctgcctaaaactggctggaaaaccctaccaaatatcagtaatgggctaaccgttgccacagagcttacaaacagtgagatgctgtcaggttcacgcatggcaaaagcaggtatggtaacatcagcgtcagtacaaggcgatattgagaccgagcttatgtttggggcgtatgatgaattaattgctgctgctttttggagtgaatggtcagcaggtgctagccctaatacgctaagcgttggtgcaacaaaacatcagtttgctatagccaaggattttagcgatattaatgttaaccatgtctttacagggtgcgttgtatcaagctttgggctgagtgtggatacatcaagcctaattaaactaaaatttggtatgacaggtctaggctatcaagaaagtaaaacaacttcatttgccaaaacaccgaccgcccaagcagataccgctaaggcaagcggtttgtctattggcgagattaaagtaaatggcacaaaacttgatgtgtgtgttgaaagctttagttttgagcttgataaccaaacagaagtacaaaagtgcttgggcgataatatctatggtggtaatatcttagccatgcttaccaacattacaggctctatgacgattgcttatagccaaaaagcccatgagatgattagtaaccaaatgacaggggcaacgctaagccttgagttgccgattaagtttggtaatagtaagtatgtgattaaaatacccaaatttcaggtatcaggcgaaattccaagcccatcaggcacggatttggttaccgtggatttgtcttacacggtggttgatgaaagcccagtgattgagaaacataccgcctaatcagtgataaaacaaaagcctagctactgcaaatagctaggcttttttattacccccttntggcagataaaaggaattaacttgtggaatatattaccataattgtggattttatgaaatatttaattgaaaaacacggcttatttgtcatttggctgatggtggcaagtctaattacgctttataagctggatatgattttaaccgccgttcatttgttttttaattaagatgggcaatattatccatacgattcgataaactttaaggaaaaaataacatggcatttgatttaacactcttaaaaaaagacgctaagatgagtgctaagcgtgagattgaatttgatgggcttgaattgacgcttgaaattcaagcaagcgaagcgtttaaacgagccgccgctgaggtacaaaagatagcaaacacgcccaaaaaggtaaccaaagacagcttaaagcgtggcaatcaagatgaaattggcgaatacgaagccatgctatttatcttaggtgagtactgtatcagtcaatggaatgttaccgctgatggtgagccgttagccatcaatggcgataactttttaattctgcttgaccaaggttttgaaaaagacaaattaacacagtttattaccttgctatttgaaacttatgccagccttagccaagaatttgaagacaataaggcaaaactggtaaaaaagtccacgactgctaccaatgggaaaaaatcagggtaacacttaccccaaaccgtattgagagctatcagcggttggggattgatttgcccacgcctgccgctgccgatgtatatgttgacaatatctttatgatttttgccctagcaaaccgagcaaggcgatacacccaaggcatagccctaccgttgtctgtgcgtgatgtttgtgatgtttgtgagcattatcaaagcttattgcccagggcgtggctgtttgagcttatttttatgcttgatgatttatggcttgatgagtataacaaaagctctaagaaaacttagggctttatttcaaaataatatcttaacaaacaagaaaaaatgttgtaaagttataactccgattaactagggagttattgaatgaaaaagctttttaaatttattttgattgggctttcatttacaggttttgcacacgcacaaccaaagaaggatatcgtttgtgatactgtatctttaattctaaatgccaataatgacagtatcaagctgtatgcggattggaagaaggaagcctctttccccaaccctgttaaatcagacagggcgggatataccgattataaactcacctgccctaacatctcaatcactcagaataaaggcgttattgagatgaaatcaaaggattatgaaacactgttaagccattttccagattatcgcagaaaaatttccctgtttgacctgtcgggatatagatacccaaacatccaagaagacccatattctttctcggttagtatcaatctagaaaattgggaaatgaagggtgcgtttcttcctgttaaagaaggggatgagctatctgttttggatatgccaacatcaggagttgttgggtatagagtggacggcggtgagttaaaaccgcttattcacaacttaaaagttcatagttataagagtgattttgagcaggcgaaaaaaattgagatttatgtcaaggcggaaagcaaagttggtgaagccaaaacacctgtggaagccttgattatagacaaatccaacggttcaatcaaaatccttaataaacacaaattccctagcaattagcatgaaaaataaggattttgggttcaggactatcatcacagaacaccccgatggttcttggaccatacatagcgaagatgattaccttgataactacttggaagccctggaagttaagaagtcgggcgatttaagtaaagcagttgagatgttaaaaatctcatgcgaaccgccaacaatttacaaggctcattataaagagctgtttaaaatctttcggattttgaacatgcaggatttaaaaaatggttgttatcaacaagtcattgaccgtgtaaatttggcactaaggtatgatgatgaaatgatagccgagctatgccgtcattggggtagtgttcatggaaaagtctatgataaatcttattttgctagtgatagtaatgtcctaatttctgacattaagaatttacttaaagcatcaacggcaatagatgataagattaatattaacaaggcaaaagacttaattatgaattggcagtaaaatccactttacatggtggggcttttgttgtattatatacttactactaaactcaaagcggtatcaaatctcgccccgaaagtgcgtgttttttatgcctattttatcctaaagttaatccgaattctttttgtgataaaaaccatttcaaatcgtcttatgacgggttgagagagcctaatataatacccagcaatggggaataagctccgctgtctttgagcagtagttgaaacctgtcgctctatgcgatttttactaactaaatctcaaaggtgtcatcatgacaaatcaaatccaaaccgtgaattttcacaatcaaaccttaatcactcttgaaaaagacggtaaccattatgttgccatgaaaccaatttgtgaaaatattggtttatcttggaatgcccaatttgagcgtatcaagcgtgatgaggtgctttccgaaggcattcgtatgatacgaacacctacaaaaggcggttttcaagatgtggtttgcttgccattgacattattaaatggttggttatttggtgtagatacaaaccgtgtcaaagctgaaatcaaagaaacgctcatcacttacaaaaaagagtgctatcaagcgttatttgactattggcatgatggcgtagcgatcaatccacgagcaaccaaagatgaacgcaaaccactggtacaagcggtaaatatgctcgttaccgagacaggggcgatttatagcaatgtgtggaaaatgatacaccaacgctttggcgtggactgtgtcgatgagctgacaaatgaacaggtttatcaagcggtggagtatgtgcatggcttgatattacaacacggtaaaaagcctgtggatgatgtcctgctttataaagtgcttgtagacagtgctgtttacctaagagattatgcacaactcattaagcagatgcgtgatatcagattctttgatgagaatatgggtaaaaatatgtataacttcgtcgcagataacattaatgacattgtcaggcttacccatgatatgaaactgaccaataaaaatggcagaccgatgtttgagaaaaatcgcattaattattatggtggcgctaccttgatttatcgttaagaattaaacaagttttaaaaccctgctcatcagatggtgagtggggtattggtatttgttattgataagtaaaacaaattgttcaaaccatatcatgcttgctataatataatttcagcgatacttttagtattgttatcatcaaggagatgggtgtatgcaagataatgctaaaaaatcagatgcaactcaccactctgctcaacttttgcgtgatatgtttagttgcctaaaccaagcaatgagcagggaaaccgagaaatttcaccaagagcaaaaaaaggtaaaagaggagattaaccgtggcgcaagaattaccaaccacagaatctctctttgattttttatatcttgacagcattaaaattcgctcgttttatgcgcagctgacaggtaaaagtcggtgaagacatggtatggatgaccttaaatcgtggagaaatggtcggcaatccacacgatatcaacctaaagcatggtaaggtgttgtttggggaatattatgttttgggagtgttagacgccatcccaaatgatgatatgaatatagatatgacaactggtagctttggcgatgtaatcttggaattgtctcagtcgctcaaagaaacaatgggtaggaatacaagcagttatggcatcactccgattgctatctttagagtaatccgcaccaatcaacaagctaaatagcactatataacttaaaaaaccaaccgtcctttatgggcggttttttattgggtgaatttatgttaaatacataccgcttagacatacaggtaaatgccgatagtgctaataccgcattgggaaatctaaaagagcattttgataagattgaacaatcaagcggtaaggcaagcgttggtattgatggcttttcagacaaagcggataaggcgtcaaaatccagtaaaaaagctggtgatgaagctaaaaaagcaggtgatggggctaaaaagtttggtgatgatgccaaaaaagcaggtaatgatattgatgacttaaagcataaagcagatggcttaaaaacagcgtttggcacattaaaaggcgtgatgtttaccgcccttgctgttgctggcgttggtggtatcattgccaccgccgatgacatgcaaacccttacaagccaaattaaaattgccaccacaagcaccaaagattatgcccatgcaatgagtgagatagaacgcattgcgatgggtaatatggtcagccttgactctgttgggcaattgtacgcatcaaatgagcggtcattaaaacaacttggcaaaagccaagatgaagtgattaagtttaccgaaaatatcacaacagcaatgcgtgtcagtggtggtagtgcagaaagccaagcggccgcattaactcagcttgggcaagccatggcgtcaggggtgttgcgtggtgatgagtttaactcaattgccgagcaagctcctgttattatggagctgatggcagacagcctaggggtaacaacaggcaaactgcgagatatggcaaaagaaggtaagcttacctcaaaggttgtttatgatgcccttgctggtgcgtctgcaagtgataagcttgctgaaaaatccaaaaaaatgtctacaaccatcagcggtgcaatgcaaaacattcaaacgcagtggcgtcttggtgttgatgccatcatgaatggtgagggcggtttatccagcgtgcttgctgatggtattaatagcattgcgttgggggcgtcatcatttgttgatagcttgcctgcgattaatcaagccatcactgataccattgccaaagccaaagaaatgggtacggcatttttagagtctgattttgggcaatctgcgatacaaactgccaaagatgcctttgaacaattaaaatcagccatgcaaggtgtggttgatattgcaggcgatgtaaaagcattctttgagaaaaaccctgagcttgcaattgcactggcgagcggtgttggggcggttgctggggcgtttttattatttaaaggtgtgctgattgtatgggcaggggtggcaacgctggcaacagtggcggggggtgcattggcggcggtgatggcagtactaaccagtccgattacgcttgtgattgcggcttttgctgcactggtggcggcaggtgtgtatgtataccgtaattgggacacaattaaacaaaaggcaaatcacgcatggcagagcattaaagagacttggcagggcgttggcgaatggtttggcgagctttgggataaagtcaaacagaccttttttgattggttatcacaaatgccaaaaccagtacaagatatggtggctaatattggtgaaatatttagcacaattgtgaatgtggcaggggcggtttgggatggcattgccaatattgctaaaagtgtgtggcatgcgataacagaatttgtctcttacgccattgataaaattaagcctgttatcaaatctgttttagagttttttaaaaacgcatgggacggcttggttagtattgctaaaaccgtttggcaggcggttgtcagtgttgttagccatgtttttgataaaatatctggcattatcagtacacaatttgaagccatgaaagcgatttttatggcaggtgttaccatttttgccagcatttttaatgcaggctttgagatggtgaaaaccatctttagcaccgcttttaaagtgataaaagccgtattaactggcgatatgcaaggcgtaaaagacgccatcaaagatggttttcaaaaagccgttgatatcttaaaaaaattggttggtaacattgtagatgccttaaaaaaacttggcaaagatttactacaagttgggcgtgatgccatgcagggctttattaatggtatcagcgagaaaataggtgcagcggttagcaaagccaaagagatggcaagtagcgtaaaaaatgccatcacaggcttttttgacattcattcgccatctcgtgtgatgaaacaagttggtggctggatatcagagggcttggcaattggtatcgcctataaagcaccgatagcagccaaagaagccaaaaaccttgctaaaagcgtaaaaaacgaccttgaaagcgaactacaaaaaaccgcagaagagatatttttaaccaaacagcacattgcaggcaacccatacgcccagctaaccaaagacattgcctttggtaaatacggcaaacaagacaccagccgattacaaaagttggcacaagagcaaatcttacaaagcaatattttaacgctcacccaacagctgcatgaagcccagcaaaatctcgccaatgttgggttgactaatattgaaatcatgcaaagacaatatgatgaaaccgacaaatctgtccgagcgtctttggatttgtttgagcaagtcaagaaaacaagtcaagagctaattgatgcaaccaatcgccatgaggcgacccaagagtttgaaagcacgctaaaagacattgcaaaacagatggcaattatgggtagtcaagatccattggctgagtttttatatgacttacaaaacgctgagaaatatgcttattataccactgagcagttggcaactcttaaagatgagatgattaagctacaagccgccaaagacgccaaacaagcaagcgatggcattgaggaaagtctaaaagatattaacaaacagctggcattgctaggcagtaatcaccccttagatgactttttttatgagcttgaacagacagacaaatacgcccatgcgaccactgatgaaatcaatgagctaacagacgctatctttaagctacaaaatgccaaagatacgctaaatgccaaacaagcatttgatacgctaatgaaagatacagcactggcaaatgaaacgccagcccaaaggctacagcgtgaatatgatgaaaaaatggcggtaattgataggtatgagcaaatgcacagcgataagcttggggacgccacaagcctaagacagcaaatcaccgagcgatatgagcaagccgaaaaagatgctaaagtcaaaaactatcaagagcatttaacagcatttgcagggtttttaaaaaacacagcaggtgagcagtccaaagcctaccgtgtcatgttcgctgcgtcaaaagcctatgcgttggcggatgtgggcgttaaaatgggtaaggcggttgctgatgcttgggcagacccatcagcggtgacaatttggcaaaaacttgccaatgtcgccaaagtgtctttggaacaggggcatgtgttaagcatgattaacgccattagccccaaagggtttgccacagggggctacacaggcaacatggggataaatcaggtggcaggggtagtacatggtcaagaatatgtactaaatgctaaagctacaaagcgtatcggcgttggcaatcttgaacggctaaaccgtggtgatggcattggtggtcatgtcaatcatattaatgtccatgtaaccgtaaactctgacggtagtaatgtccaagccgatacccaaatgggtaaaaccatgggcgaagccatggcaaaaatcgctcggcaagtcgtgatacaagagagcaaacaaaacggacatcttgacaggctataccgcagataagcaaaaacccaactgtttgcaccagttgggttttttattacccctttaaacggtacttaaaaggataatttatggtaaattttaacatagaattggcaaaaaatgaaaacttttacatgggacatatcggcagacagtagcgaaacaaccgccttaaataccaccataaccgcctttggtgatggctacgagcaggcggtaagttttggcattaacaacagccgtaaatcatggcagtgttcaaaaaccgacacaaaagctgtcattgatgagattttgagctttttattaaataccaaaggggtagagccatttacctttgcccccatcaagggcgagcctgccattaaagtccgcctagatggtgagatatcacgccaaaagacggggggcgatgtttggcaaattgggtttactttaaagcaggttttttaacccaaaccgcccatctgatgagcggttttttaactcgacgacattaatgtcggtgacatacccacagcccttgtaaatcaagggcttttttaggagcaaaaaaaatgagtgaaacaactctaaccgaactatcacgcaccgaagcgacggtattacagagctttatcgcacaggtggacttttggaaaaaccaacacggcgataaagctgccaccattgaagtcatctactaccctgaggatgacggctttgaggtggcgaacggtgagcctaacaacggcgtgctaaaacgcaatcgcaccacagcgtttcgtgctgaccttttggcatgggcatctaaccagttacgccaattacaaggctgggacaacagccaaacggtcaccgagtttagcctatcttataaaaatgaccgttatggggtgcgtgctgcccttgccagtgaagccaccgacaaggcagatgatggggatgatgctaagaacacagattaacagctgatggctttatcatctgttcattgactgtctgtcaagggggcaataccgcctctttggcaggtttgggagtaaatcacatgagttttaacacagacatacaacaaaccaccgtacaaggctttattaccttgtatgaattagacgcacgaaaattgggcggtgagatttaccgctttcatgggcataatgatggagtgattagatggcaggggcaggattttcacccaatcgccatcaaagccgatgggcttgaaatgcgttcagatggcagggcaagcacgcctaagcttagcattggcgataagattaatggcatacaaggggcggtatcagccctttgccgattgtatgatgattttgcaagggctaagcttactgtaacgcataccctgcaggcgtatcttgacagccatgatgcccaaaattaccgccagcaagaatggtacatagaacaaaaggtgagcgaaaacccaagccttggcattgtagaatttgagctatcaaaccctgtggactttgaagggcaaaaaatccttgtgcgtcaaatcaccacttactgtaatgaagcagtctgtggtcgttatcgtggtgagatttgtggctatacaggtacagcacgatttacccatgatggcaagccaaccgatgaccctactttggacagatgtagcggtttattagcccactgtaagttaagggacaatgaaggcagtttttgtggatttcctgccgctgggttggtgggttagtcaagcgttttggcatactcaaccaaagcgattttgattgccattgcctttgagcaatccttatgagccataatctgatttaaggcatctaaaacatgaggctcagtatggctaatgacaagtccgatgcgtgccagtgacttatcaaaatagttagcggttgcttttttgcgtgcttgcgggcttgctttatctgccataaaaaatccttgatttttataaaaatggtgctatgataatgggtaaggagtggctaggcgtttccacctaacctgccttagtagctgcaactaccttaggcttttactgttagtaagctggatagcttagcaacagcagggcaatgatgattgtgagtcttagcattgcctttcctccttatgttaccgctaggcttgtcctagcccaatcaacaccccttgagttgatgaaatgtattgtattacactatacaaataaagtcaattaatttctgcgttttttcgcaaaattatttggcttttttattttataagcctttgaattataaacaaatattcagccgtccaagtataacttgggcggttttttattggataaaccatgcgactaactaaaaccattaaagaagctatccacgcccacgccaaaatctgctatcctgctgaatgctgtgggcttatcatagatgggcagttttatccttgtgataatatcaccccaaatccttatgagcattttgagatagaccccaaagattttgcccgtgctgaaagtatgggtcaaatacaagcgattgtccatagccaccctgacggcaatgccgagccgtccgaagtggatagggtgcagatgggcatacatgggatagattgggtgatttgtgcttttggttaccacgctgatggcaaagagtactttgatgtcaaatgccataaacccaaagcgtatcaagccccattattagggcgtgagtatcatcatggcgtgcaagactgttatagcttggtgcgtgattattacagccgtgaacttgatattcacctgcctgattttcaccgaactgatggttggtgggaggatgagaaccatgaaccactttatgaaaataacttcaccaaagcaggttttatcaagatgcaagataaaaacgacttacaaaagcacgatgtcatcttgtgccgtgttgggcggacgcatcatgtcaatcatgctttgatttatgtgggcgatggcaagttaaaaagcgaaaccacgcctgattgtgtgggtaatgccctaattttgcaccacccccatggcggtcttagcgtgcgtgagatttatggggacaattggcaaagacgcacggcgatggtggtgcgtcatcagtcactaggctaaatcacgactggcaagctgtgctaggtaattactacgactcttatatagcgatttgtgtgctttaaccttttcgtcaattttgacaatcaagcgacttggcaaggtaacattaatcttttcagatttgcccatataggcggataaatcaatatcaaccaccgcccaaatcataccttgataatcaggattttcttgatgatgagcaatatcggtcgcttgagggatatcctcaccatcatcagccaacatatccaaatgcaaaacaatggcttcataggcatttttaaccgcctcatctactgtatcgcctgcactaaaacagcctacaatatcaggtacaatcacgccataacactcattggtgctgacgggcttttcaatagcgataggatataacatatttatctccttagatgatagccaatactgggttattttaacccagcttgttttaagatttgcttaactgtgccgattggtaagtctgacttggggtgaggtatggttaccttgccctgtttggttgggtgtttgtagtgatgatgactgccacgcaccgcaacttcataccaaccgtcatcagtgattagcttaatcatttgacggctattcatcttaaagttccttattgatttaagatggggttattataaccctaattacaagttaaatcaagagttattagggttattttataaaaaaataggaaaattatgaaaaccgtcattttacacggcattttagccaaaaagtttggtaaatcctttcgccttgatgtcaaaaccgctaaagaggcctgccatgcgttggcttgccaaatccctgccttttatgagtttatgatgaatgctgagaaacaaggtattaaatttgccgtctttaacggcgaaaaacgcactcaaaaaaccaacatcggcgagaagcaagtggacgatattaccacagcaagccacattcatatcatgccaagggtgataggctctggtggcaagacaatgggctggctacaagtggtggcaggatgggtattggttggggtaggggtagttacaggcaatgctgggctaatcgctgcaggggcaggtttgatgttgggcggtgtgtcaagtctactaatgcccacccccaaacttgacccaaacaatgaagatggcaaccgcccaaataatggctttggcggtgcaatcaccacggtggctcagggcaatcctgtaccgattttatacggtgagcgagaaattggtggttttattgtctcagcagcgatttatgctgaagataagatggtacagggcgtaaaagtttaggattaaaactgaaagggtaattatgaaaatctacggtgcaaaaagacaaaaacaaagctcaaacaagccgtacattcaaaaagacacagcaagcagtactaactcttatcaagcactgtacggcttatcagagggtgaaatatatggtcttgtagatggtggcaaatctatccgccttgatggtacgcccattatcaatgataatggcgagccgaactttcctgatgtgtcatgggattttcgagctggaagcattgaccaaacgcacattaaaggcttttcatcggttgaaaacgagcaaagtatcaatgtagagctacgccacgaccgcccctataccaaagccatcaataataaacaactgtcagcggtggcaatccgcttgggttttaacgccttgcgtgaacaaaaagacaatggcgatgttgttggctaccgtattgaatacgccattgatgtgcaaaccgatggcggtgcgtgggagatggtgctaaataccgccgttgatgacaaagttagccaaggctatcagcggtcgcaccgtattgacttgccaaaggctcagcaaggctggtctgtgcgtgtgcgtcgccttaccccaaaccgtgatagtgagatggtaagcgataccatggttgtctctgctgtcactgaaattattgacgctaagcttcgctatccgtgtacggcactgcttgccttaaaatatgacgcccaaaccttttctaatattgccaaggtggcggtgcatgtgcgtggcatgttaattcaagtgccaaccaattacgaccctaccgcacgcacttatgatgggctttgggatggtacttttaaattggcttataccaataacccagcttgggtgttttatgatatttgtaccgccaaacgctatgggctaggcgacagactggcgggtaaagttgacaaatggagcctgtaccgcttagcccaatattgtgatgagatggtggacgatggcaaagggggcaaagagcctcgttttacggtgaatgtctatctacaaaaagctgatgatgcgtatcgtgtgctacaaaacctagcatcagtatttagagcattaagtttttgggacggtaccagcattgtggtggatgccgatacacccaaagagcctgtttatgtgtttagtaatgccaatgtcattggcggtgaatttagctatacaggtacacgagcaagagaccgacacacgattgtcaaatgtgcttatgatgaccctgataataattttgaaactgactatatctatgtgcaagatgaacatgccatcgccaaatacggtattaaccaattagagctaaatttatttggttgtacaagtaaaggacaagcccaacgagcagggatttgggcattaaagtccgaacagcttgaaaccgaaacggtgagctttagcacaggcttagatggctttatccccaaagtgggggagattatccatgttcaggataacagccgagctgggcgtaaatgtgtgttgggacgatggccgctttttggatggcgtgcattttgaattacctgcctaataattacccccagccgttgcggttgggggtaatttttatttaactaaggctacgattaaggcgattagtgcgaccgctaagctcaaccatgggaaccatgtggcttctttttggatttttagggtttctgctcttaatttttcagcttccattttaatacgctcaagttcagccatttttagttcctgccctaaagggcattggttagttgactatcaagagagcttatctcgtcttgatgtgtttattacatgacttttaaagtcataaagcaagcattatttttaaaaaaaatgaaaaaaatttggttgtatgttgccagctacagtgcgacttgctttaattctgccaattttttaagccactgctcataggcggccgtttgctgtggcaaatagttgtaatggtcatacacttgttgcatattacccacagtgtgaccaatcataatctcagcaatgtcacgactggtaaaagcactgaaattggtgcgtgcagttctacgcaggtcatgaaaggtaaagcgtggcaactgcacaccacaatggcggtcaatccaatgtatcagacctgtggtgatgtctaaaaatgcgtttttttctagcatttcaccacgacggtcgaacaggtattcgctgcgtgaaatggcgatggcttcatcaatcaaagcttgcatgggcggcagaatagggcgtattaacggttgttgggtaatatgacctactttgtggttctcaggtgggacagtccaaacaccgtcttgaaaatcggtaattttagctcgtctaagctcgatgccacggcaaccaaacatcaaagcaagttcggtcgctaagcgattacggtagctaatttttgagccatacaatgctttgtaaaataagatgatttcatcatcacttaagtatcgcttacgcttaacacggactaaattaaaatcactcaattcaaggtcggcaaggatgttatgtgtgacaatttcacgcttttttgcccatttgagcatttgcttggtatttgtgagtatgcgttcagcaatgcctggagttttttcagaaatggattcaatgatgataatatactgttgtaaggtaatgtcattaatcggcagtgagccaataacaggaaaaacatagagctcaaagctacgcttgatatcggacgcttgttttttggtgatgactgctgatttatcataccactgtaaaaaacactcatagaaagtgtcagcgttaatataagcctgcttggcgatttgctcttcaagttttgggtctttgccatgcaggagctgtgttttggcagacagtgatttttctctggcttgcttgagggatatcagtggataaacacccaaatcaaaccgctttaatttaccgttaaatcgatagcgtaattgaaagacaatcttgccttttggggagatgcgtacgctcatgccatcacggtctgcaatttcggtaactttatcacggggcttgccgttatttgcttttagccaaacttctgtcaacataataatccttagaaattatgtacacaattatgtacacaaaataagcgtcttattatgtggtattttgttgcaatttgtctagtgtaaaatgcacaaaatatcgaaaaataaaggtttagaagtggctttatgttgctgtttgtgatttgttgttttatatatcatcattggtgtgcccaatgatagagatggtagtcagatgagatggcgtgggcatcataggttttaccagtcgtgttgctgaagctttatgcgtaactctttacgcttttttgccatttcgtagcgttgtttggcaagagaatcatccacaaccaaaggtggtacaggcacaggcttacccgcttggtcgacagccaccatgctaaaataacaactgttggtatgacgtgctgtgcgagtttggatattttctgcttctacgcgtatgcccacttccatcgaagtggtgccgacatggttaatacgcgccaaaaaagttaccagctcaccaacataaatcggctctttaaaaatcacttggtcaaccgatagtgtcactacatagccaccagcataacgactggcacacgcataggcgacttggtcaagcagctttaagatagtaccgccatgcacattacctgaaaagttcgccatatcgggtgtcatcaatactgtcatggtcaaatcagtagaggcgatatttagggtgcaaaatccactcatagtaaatcctaatattaagtaattataaacaatttggtggcttgggtaagcctgcaatgcggttgacatgccgagcaaccaagcctgtattaaacagtttttgtagcttttgattgctaatatcaaggttgggcaagcttgccatcagatacttaattaatgggcgtgttgatggactgtggtgataagtttcaaaaaaaacacgcacctcgccaatgatttgataatgctcgctttcaagtgttaccccaatcgtatccgcaagtctttgtgcgattttgggtgtccaatcggtatgattttttaggtgaccatcgtcatctaggctgggtaaatggttcatagtggtgataattatctactgaaaataaagttttgagtcatagtcatccaatgccaaactgcctgattgtaatgataattgaatgaccttatctaaggcgttaactgcttgaaaattatggtatgctttgggaagatcatacagtgccaaagactgtatcatgccatatattcggcttttgggattatttagtaaaactaaaactttttcacccagctcaatctgaatatcatgatcaaatgtcgccaaagtcagtgccaaagcaattgcttcatagctgattaattcgctgtcggtattgatatgaattaaaaatttcatccattatccttaaaactgtaccactgatgttgtatcatcaatcatcatagcaagctcagacagtccaaccaaagaaaacggtggcaacagattatcaccgattagcccatggcgagtggcattttgggcatcacagacacctcgagccaaagcggtactaacgcagacgggcagggtgatgccatgattatttgataatgcttgccattgcttagcaacgcttggcacatcggcagtttgccacatcagtcgattggcggtataagccccatcgccataaaaaaataccgaaatctgattacccaagtgtaattgcttggttgcgtattcaactgcaagtttgcctgcatggctgtgtggtgatgaagtaacaagtagtaaaatcataaattaaggtcgcttttcaatcaacaaatcatgataatcgtttattatagcccaaaaattggtgtaaaataagcccaagtcattttttattgatatatgattttaaggcggctgcatggtttctttgcattttatgcccaatcaagctcagcttgactgcttatcactggcaagcccatttgcatctcaaatttatcaaaaacacagcgatgacgcccaagcatttttgggagaatatggttttgagcgaagcttgtcaagcttagattttgatgcattggttcgtcgttttgttgggcttggtaagaccaattatcttgattttaccaatgaagagatggtcatgtcaggactgcgtaactacgccaaatgctgatgcttaagtggatttggcaagatgccttgtcggtgatttctttggaagagttgacgcatgagttgtctgattttgccgacagctgtatccagttttcaaaggattttgtgtatcacaagctgaccaaacgctatggcgagcctatgattcgccaaaaaaataaaacactcaaagatgaacttgccatcatcgctatggggaaattgggcgcacaagagttgaatttatccagtgatatcgatttaatttttgtgcatatcaataatggtgaaacgaacggcaaaaaagtcattgataattataaattcatgcgtgatcttgggcgtggcataattaagcttttggatgaaaataccgaacatggttttgtctttcgagtggatatgcgtctgcgtccttggggggatggctcaccgctggtgatgcatatggcggcattggataaatattttagccaacatgggcggacttgggagcgttttgcttggctaaaggcgcgtgtggtcaatgacattagcgatgaatttgaacaaacgcttaaccaattatcaagaaattttgtgcatcgctattatattgattatagtgcgtttagtgcattgcgtgaaatgaaagccatgatcatcaatcagcaaatccaaagacaggatttggataatgtcaagcttggcgtaggcggtattcgtgatattgaatttattgttcaagcgtttgccctgatttatggcggtcaccatattcgtattgctgaaaatcctgcatgtcttgactgtttgacggtattaaccgagcttgattatattgataatgatgaaagcaaacaactggcagcggcgtaccgatttttacgccgtttagaacacgctatccaagcacgatatgaccaacaaacccagtgcttgccaagtgattctgatgagatgcttgccatagcaaagaccttaggctatgagtcggttaaggcatttcgctcggtgctggatgcccatcgttataatgtcagcagaccgtttggacgcatggtaacagataggcaagcccccaagcaagaaagcttggatactgctcagattcggtcgtcattggatgatgtgttgggggataattcagcagtcgtgctcgatgagtttatgagttctcggctggtgatggggcttgatgatgtcgcaaaagatcggcttaatcaagcctaccccattattttgcatgctttattggcacatgcccaaaaagatggtgcagagtcggcaaaaatcgccttacccagattgattgcgttattagaggccatttgtcgtaggtcaatttatttggtgatgttgagcgaaaatccagatgcaacggtgcgtttaattccaacactatcagcaagcttatggatcgcccgagagcttgcacattatcctgtactgcttgatacattccttcaaaagcgttatctacatctgcctgataaagctgagcttaccgacattctaagacaaagcttgcttagaatagagccttttgatgatgagggctatttgaccaccatacgattattcaaaaaaactcaagttttagcagtagccaccgccgatgtattaggtttgcggcacaccatgaaagtatctgacagtttgacttatatcgctgaagtggtacttgagtcggcattgtatcgagtattttatgagttgtctgtcaagcacggttttcctttgttaaatactcatgagcgtgcaagcatcgctgattgtggctttgcaatcattggttatggaaaattaggcggtcttgagatgggttatgcatcggatttggatttggtgtttttgcatcgcattgacgaaaaaagcgaaaccgatggcgaaaagccaatcagtggcatgaaatttgcttctcgcttgatccaaaaactcatgaactatctggcaacccaaacccgtgatggtcgcgcttatgagattgatacacgcttacgcccctcgggcaatgctggcgtgccagtgatttctgcccatgcttttaagatgtatcaaacagacaaagcttgggcttgggagcatcaagctttggttcgggcaagagggctgacgggcgatgtgttggtactacaagcatttgaccgtattcgcaagcaggtcttaaccacgcccagacaagagacacaggtacgacaaaatgtcattgaaatgcgtcaaaaaatgcaacatcatttgggtacaaaaacaatgcggcgtgcgtatggcgagactgagcagtttaatctaaaacaagattttggtggcctgatagatattgagtttttggctcaatttatggtgcttgcctatgcaaataagtacccaaatttggcaatttggccagataatgtacgcatttttgaggaagttgaaaaaacgggtatttggaccgccaatcgctgtcaaaagctgacacaagcttatttggacttgcgtaaaaaaacccacgaacttgccttgtctgaacaaaaaaatatcgtcgatgatcaagcgtggcatgagctacgccaatttgtgcgagaggtttgggaagatgtcttaggctgatcaataacatagcggttaatccaaaaaatttatgatgaaaagtgtgttttgacataataaaaagcaatcaatttggctaagaaaaccattttattatttttatggcatctgatataatcgcttgagatactaaatggtaataattttaacaatcgatatggagtaatttatgagcatggcaacccaagaaggcaaaatgtggctagatggtgccttagtagagcagccagatgctaaggtgcatgtgctgactcacagcttacattatggcttggcggtgtttgaaggggtgcgtgcgtatcagacgccagatgggcgtacagcgattttccgtttacaagcgcatacagagcgtctattaaactccgccaaaatttttcaattaaattgtacttatggctttgatgagcttgtccaagctcaaaaagatgttgtgcgtctaaataatttggcatcagcatacattcgtccattgatttgggtgggttctgaaaagcttggtattgctgccaaagataataccattcatgctgcgattgctgcatggcattggggcgcttatttgggcgaagaaggtattaaaaaaggcatccgtgttaaaacctcaagctatacccatcatcacccaaatataaccatgtgcaaggcaaaagctgccagtaattatcctgtctcaatcctagccaaccaagaggtgactcgtaatggctatgatgaagccatcttaatggatccacaaggttttgtctgtcaaggttctggcgagaacctatttttggtcaaaaatggcgagctacatacccctgacttgtcaggcggtgcacttgatggcattacacgccgcacgattattgagtttgccaaagatttgggcattaaagtcattgagcgtcgtattactcgtgatgagttttatttggcagatgaggtgtttatgactggtacagcggctgaagtgacaccgattcgtgaatatgatgatcgcatgataggcaatggcggtcgtggtgaattgaccgaacaactacagactttgtattttgatgttgttcaaggtcgcagcgataagtatcagcattggttaagctatatcgatgaataatcagccattgcaatcatatccatcatcttaagattagcctggacagatttcttaatagtcttcttaacaattaaacggcgctttgggtaacttaagcgctttttaactttaatcaaattttaaaatacaaaggttaaaatacaaacaggttgatgatgagtcaaagtgattttaatgaaatattgctacctaaacctgaatatcctgaagcatgggaatgctgcggcagcgagtgcggagattactgtgtttatgagatttatcggcgtgataagatagactatgatgcacaacaaaaacgccttaaggaatttttggacaaaaaaacagctgaatgatttgctggttttatttaatcaatggtggggacggagagacttgaacggttacaccttgcggcgctggaacctaaatccagtgcgtctaccaatttcgccacgtccccaaatttggttataagcattacgcttttgtgcgtgctattatagcggatttttatcatttgacaagctttttatgcaaattttattttttcaggggtttgatatattgttatgcttaattttgacaagtcatcgtggtattgatgatagatctgacatattcgtcgattgattggtatggaatttagcggtataattattcttaagccaattgcaaatcctgtcgctcggtagtgatgttctctgggcgattttttgataattatttttaatacaatctaaataattatttttaatataatattttttaatataatataaaggcagttatgcgacattttttatttgatatcatttttacttttgtctgcttggtgattgcagcatggtgggggtatagccatggtggcatctctgagatgtttttggcactgggcattacagcaattttggcaatcatggagatttcattatcatttgataatgccgtggtgaatgcctctattttaaagggttggaatgatttttggaaaaagatttttttgaccgtaggtattttgatcgcagtttttgggatgcgattgatatttccaatcgccattgtcgcagtaactgccaatttgggtatgggtgaggtgattcatctggcactgaataatccagtccagtatgccgagcatcttaatgcacatcatgccgaaatctcagcatttggaggaatgtttttattgctggtgttcttaaattttatgtttggcgataaggatgtgcattggtttaagtggctagagtctcgcttggtcaagtttagtaaagtagacgccatgagtgtgtttgttgcgttggttgttttgatgatctctatgagctgggtagaagaagcaaagcaaggcgtcgtcatggtcgcaggcatttgggggattttggtctatttgggggtgagtgtactatcggcactcctagagggtgatggtgacgataaggcggcggtatatgatgcaaaaggccgtgagatcacaaataccgctggcgtatcatccacaatcctaaagggtggtattgcaggctttttatatcttgaggtgcttgatgcgtcttttagttttgatggtgtcattggtgcctttgctatcactaatgatgtgatcgtcattatgattggcttggctatcggtgcgatgtttgttcgttctatgacgatttatttggtaaacaaagggactttaagcgattttatttatttggaacatggtgcacattatgccatcggggcgcttgccatcattatgttgctatcgacacggtttcatgtgcctgagattatcactggattgattggcgttgcatttattgtgttgtcagtatttaattcgattcaatacaataaaagacatgccaacagttaagccatcaaaagccagtgttttactggcttttttaattggatttttaattaaccaatcattcaacagcatcttcttgattttttggcatagcagcaataaaggcaggctgagtgttggcatattcataaattcggcaaagtgttggataggcgctcagatccacattaaagcgaatggcgttgtacatttgaggaattaaaaaacaatcagcaaaggttggtgtatcaccaaagcaatatcggcccgctgtttggcttaatgttgtctctaaggcatcaaagcccaactgtatccaatgtgcgtaccaagcattaacaccagttgcatccaagtgtagcttattttttagataatttaatactcttaaattattgagtggatggatatcgcaagcgatgtgctgcaccacacttaaaatctcggcttttttggcagggtcgctgggcagtagggcgggtgtggggtgcttatcctcaagaagtagcatgatggcaaatgactgaccatagctaccagaatcatcctcccatgcaggtacaagaccttgggggttggtttggtgatatgctttggttgtttgctgtgattgctttagattgatgaaatttttttggtacgacaaaccttttaatgccaaaaaaattcggacacgataagcggccgacgagctgcgaaaataagtgtgtaaagttgccaaattaaaaatccttttatcagtgattaagcggttttgataaattcataacatccaatcaagctgttattattactgatattgatgaatttttcaatcaaaatcaactcagttttttatgagttactcaaaacttgggcaaatttggatgattatggctgatacaaatcgaccacatgaccgacaataataatggcaggtgcaataagattggattgatgctttttatcaataatatctgtcagtgtacctgttagcacctgctgggtgggtaggctggcatttgagatgatggcgatgggtaaatcatttggcaggccagcactgattaaagaatcaataattttagtcagtgcgtgcagacccatataaaacaccaaagtctcatcagtttggtaagtactatttagaccattaaacggctcatttgtttgataacaacccgtcaaaaatcgtacagaagttgcgataccacggtgtgtgagtggtatgcctgcataactgcttgccgccaacgcagctgtaatcccactgaccacctgatagggtatatgggcagcttggcaggcgagcatctcttcaccgcctcgcccaaagacaaatggatcaccaccttttaggcgtaatacccgatgcccctgtttggcataatcaactaatagttggttgatttcatcttgagttttggtgtgatcttttctttttttgcccacaaaaatcttttggctatcacggcgacaaagctctaaaatgtcatttgataccagtgcgtcataaagtacgatatctgcttgttgcatgagcctgagtgccttaaaagtcaataaatctggatcgcctgcccctgcacccacaatatagacctcacccaagcgggtatcatgatttttaaattgattaagctcatcgctgagtgtgccaattgtttcatcttttaaggcacgatcaaaaattgactcccaaaaatatcggcgttcagtgatggtgggtagagagtttttgatggtatctcgaaatttacctgctttgtctgcaagctctcctaagcgactgggcaatgatgattcaattttggctctaatcaagcgtgcaagtacaggcgctttgccattactggatacaccaatcacgattgggtttctatctacaatagcaggaaaaatataatcacacaaatctggcgtatcgacaatattaaccggcacaccatacgcttttgatgcacgatgaatgaccaaatttacttcatggtcatcggttgcaccgatcactaaagtgggtgtatgctgattaagatcgattggttcaaaggatttttgaaaaaatacatgatgatgagactgtaaaaaatccaaaaattcagcctcaaaatgtttcgcaatcaccacaagctttgctttagcctttgccattaattgtgcttttcggtaggcgatatcgcccccaccgacaatcagcacggttttgttatttaggttaaaaaataatggcaaagtattcataatgctcactttattattttaatattaactaaataacggtaagtgactaacagccttaccatcataaccagttgccaaatcttgcaaagtttttgttagtgtctcaacattggtttcatcgaccaaaaatgccgtcgcaccagatttgacaaagtaattggcctgatcaagggcaaattcaccgcctacaataatctcaccttgaaaaccttgatgtctagtatggcgaattaggctaaaaatacgaccgtccataaagttagcaaccaaaaaaataaggcaatcttggtgagcgatggcagattcaatgtcattgggcgttgcgtcagctgtcagtgcttggcttagatcaagcgtggcaggttctgaattggtatggcgatcaactttgattgtactcatgatttatcctgaatataaaaaatttatatattttatattatcttaaatatttatgagataattagtgatagacagctgttttaaagggtgttataccaagtctttcaatgacttgagcgaagctttcgatatgtccatggctttctatacgctcatttttatagacatttacaatggtggcgatggtttgagcaacttcgtcagcagcgacagcacgcccaaggatttgccccaatttggcatgctcgcctgaattgccgcccaagctaatttgataccaatgctcgccttttttatcaacacctaagataccaatatcgcccacatgatgatgtgcacatgcattcatacagcctgacatatttaagcgaatgttgcctaagtcatacagatagtctaagtcattgaattgtttttcgatggattcggcgatattgtgggtggtggcattggcaagcgcacaataatcaaagccagggcagacgatcatatcggttaaagtgccgatattggcacgagcaaggtcaagtgcacttaatttttgccaaagtatgtataaatcagttattttaacatcgctaagtaccaaattttgctgatgtgtggcacgaatctcgcccaagctgtattcatctgccaaatctgccagtgcaaacatttgtgcatcggtaatgtcgcctgcaggcacatagttaccatcaacaacgccagcctttaatgagatgacaacggctttatagccattgattttgtgggcaacagtgttatgctcataccaattgtaaaaatccttatcagccaaaaactcatctaactgtgtttgtactgccaagcgatcaatctgctcataagctggggtagtaaaatagctttcggctttagcaaaatgtgcctcacttaatgtcaaatcaccatcttttaaagtttgccattcatcattgactttttggataaaggtatctttgcctaagctttctaccaaaattttgatgcgtgctttatatttattatctcggcgaccttctaaattataaacacgcaaaatggcatcaagataactcagcaaatgcctgcgtggtaaaaattcatgaatcaacttcccgataatcggtgtgcgacccaagccaccgccaacaatgacctcaaaaccgatttcgccgtcacgctccaccaaatgtagaccgatgtcatgcacctgtgtggcagcacggtcagttcttgtgccgatgacggcaattttaaatttgcgtggcaaaaaggcaaattcagggtgaaaagtactccattggcggataatttcgcaataagggcgtgggtcggcaatctcctcggcatgaatgccagcataagggtcggtggtggtgttgcgaatacagttacctgaagtttgaatggtatgcatttgattggcagctaattttgccaaaatatcaggcacttcttcaagttttacccagtttaattgtaaattggtgcgtgtggtaaaatgcccataacctttatcataatcacgtgcaatctctgccaaagtacgcagctgatgactgctcattaagccataaggaatcgcaatacgcagcattggcgcatgacgctgaatataaagaccattttgcagacgcaaaggtaaaaattgctcttcaggcagctcacctgataaaaagcgttcagtttggctgcgaaattgtgacacccgctcatcgacgagcttttggtcggcatagctgtattggtacattcatatatcctattttggcttagctgatttgttttgcattatgttaagtgtttgataccaaaaatttaaattcaaaaatggaatatgggtagtgattttggggatattatcgccatgaccaatcataaaaaacgccccatgtaaaagccaaggcgtttttatcatgactgatgggttaatttgttccaaattctcgacgctttttggcaaaaaaacgatccaatctgtccatggcatcttctaaatcaataagatttggtaaaaatacgactcggaaatgatcgggctgatcccagttaaatcctgtaccttggattatcaatactttctcttcaatgagtagatccatcataaatttcatatcattatcgatagggtagatatcacggtcaatcttagcaaagcaataaaatgcaccttggggcatggtgcagctgatgcctttgatggcattcagacgctcaaccgctaaattacgctgcttatataagcgtcctgtcggtgcagtcaaagcttgcattgattgatagccgcccatggctgtttggatggcgtattgggcgggaacattggcacacagacgcatacttgccagcatggtcagcccttcaataaaatcggtggcatggtgttttttgcccgaaaccataagccagcctgcgcgatagcctgcaatgcgatgtgacttggatagcccattataggttagaaccaaacaatcatttgtgattgtacacatgggggtatgcgtgacgccatcatataaaatgcggtcataaatttcatctgccataatcaccaaatcatattttttggcaagtgcagcaatgctttttaggatttcatcagtatagaccgcacctgttggattattggggttaatgataacaatacccttggtgcgtgatgtgattttgctttcaatgtcttttaagtctggttgccaatgatcatcttcaagacagcgataatgtactgctttaccgcctgctaaatttgccgctgccgtccacaaaggataatcaggcatcggaattaaaatctcatcatcgtcatcaagtagcgcttgcatggtcatgacaatcaattcactgacaccattaccgatataaacatcattgacatctatcgcagataacagccccttgccttgataatattgcaatatcgcttttctggcggaaaaaattccttgagaatcagaatatccagatgcttcaggcaaattaagtgccacatcacgaacaatttcttcaggagctaatagcccaaaaggggcaggattaccgatgttgagcttaataatccgctggccttcagcttccatacggttggcggtttgtagtaactcaccacgaatatcgtagcaaacattggcaagtttattggatttttttaagggcttggtttggggcatgatggcgtattccgatgataaaataatgggcgtttgattaacagatgatttgatgagggttgattttggccaaatttcattaacggttttttgtttggttgtctgtaaggtcaaatgatcaccacttataagataactttcactgacacctaaagctgccgctaatatgggtaatttactcatgacaatgccatttttaccgcattcccaattggcgatcgcaccacgactgacaggcacgccaagctcactcatcttagatgccaaggcttcagctgatagccccaaagcttttcgccgtaattttagtcgcaaaccttgttttgtgatggtattttgtgggtcattcatggtaatatatcctgtattgcaattgatgattttatgccataaaatcatcaattgcaagttatactttacaaatttgattgatgaattaagattttgatatgcaagtaaatcttgcatactgatgaaatttgaaggagtgagtgatgaatccgcttgacaaagcagtgataaatacgatgagtgaggcagattggcaaaatcgcttggatgatttgtcatattatgtcctaagacaaaaaggcaccgagcaagctttcacagggctttataccgataccgaagtggagggtatttatcgctgtaagggttgtcatacgccactatttgatagcagtgccaaatttcattcaggttgcggctggccaagttttgataaggttatcgccgataatgtcgttgatgaaacgctggatttatcgcatgggatgcgtcgcatcgaagtcacttgccatcattgtggtgggcatttgggtcatgtttttccagataattatgtcaccgatacggggcttagatattgtattaattcagcagcggttgtacttgataaaacctaaagcgattttaatctatatgttgagtaaaaatttttagtcaaaatatggattaaaatatagattttttgtatttttttatatataataagcaaaatctacgatgagcgagtgattatgaatccacataactttatcttggcagagacgcagggtgagttatttgttttaatcattcgcttttttgtggaaaaaatcagacagtaatgataattttttagcgattaatcgctaaaaaattttatctaaaatttggtaaattgcaaattgcttaataattaatttataatattttatcatataaaagtttaatactaataaaaaattcgggtgaaattcatgacagctcaaatagcaaaaaaagccattttagccctcgctgacggtacaatttttcacggcatcagcattggtgcaatgggcagtagcgttggcgaagtggtatttaacaccgccatgacaggctatcaagaaatcctaaccgacccaagttacgccaaacagctggttaccttaacctacccacacattggcaacacaggcaccaacagcgaagatggcgagtctggcagtgaacatcgcatttgggcatcagggctgattatccgtgatgccaccatcatcagttcaagttttcgcaacgatgaatcactcaccgactttttacaacgccatgacaccgttgccatcgccgaaattgacacccgaaagctgacccgaattttgcgtgataaaggggctcagcacggttgtatttatgccataaacagcgacacggacatcacagctgatgatgaaaacaaagcggtgcaacttgccaaagagtttgcaggcttgacggggcttgatttggcaaaagagtgctgccacccacaaggatttgaatggacacaaggcacttgggaacttgctgacaaccctgccaccaccgccaaatatggcaaaacagacagcccaacaggcgggtattttaaacagcttggcaaacacattagtaaaaaatttcatgtggttgcctatgattttggcacaaaaaccaacattctacgcatgctggtggataggggttgtcatgtgacggttgtccctgcccaaacaccaattagcgaggttttggcaaaaaaccctgatggtatttttctctccaacggccctgctgaccctgccgcctgcacctatgccattgacaatatcaagcacatcattaagcaaacggagattccaacttttggtatctgcttggggcatcaattattgggcctggccagtggggcaaaaaccatcaaaatgaaatcggggcatcatggggcaaaccaccctgtgcaaaatttggcagatggtacggtgatgatcacatcacaaaaccatggctttgccattgatgaagcgaccttacctgccaatgttaaagccacgcatcgctcactgtttgatggcacaaatcaaggcattgagttgaccgataaacctgcatttggctttcaaggacacccagaagccagccccggtccacatgattgttcggtgttgtttgatagattcattatggaaatgcaaaaggcgaaagtgtgaatttgggcagtgacattttgaacggtaaattgggtgaatttgctttatggaacgcaccatctaaaataacttgctcttttggaaagctgttatgaattttaataatcgtgaataccgtgataaatgccgtgctttaacattaaagctgatgagtgataataaagttcgtaaacgccaagagatttatcaaggtgtcattcaattgggggaattttctgatgaaattttaactttgcgttttaacagtggtcagccaaaagtagaaaatgccatcgcttggtcaatcagttctcgaaccaaagcaggcatcttaaatcgcatcagtaaagccacctatcaaatcacacccattggtttaaaaatggcgacactgtggcaaaataaaacacacattagcgaaaaactgtatgatgaagctgatttacctgattggaaaagttatttaaaaagcagagcagaaattaaacgcaagaaaaaactgtcagataagaccagcattgaaactgatgataatgatgacatggattttgaaacccaagccaaaaatgccattaaaaatcttgaaacagaaatttcagttgaactgttaaataaattacaaaaaggcacgcctttattttttgaaaaatcggtattaaagttattgcttgccatgggatatggcggtaaagaaaacttgtttgaacatactggcaaatcacacgatggtggcattgatggggtcatcaaacaagacccattaggcattcaaaatatctacattcaagccaaaagatatgccagtgataacatgattggttcaaagaattacaatccttttcaggggcattacagggcaatggcgtggaacggggtgtgtttatcaccacatcatcattcaccaaatccgcccaaggattttctcaaaaattattgggcagaattgtcctgattggtggacaagagctggttggtttaatgattaaatataaagtgggcattcaagtcaaagaagtgcttgaaatttgtgaaattgatgaagatttttttgaatgaatatgcccatcatgtttgctgacaaattcaacctaactcttgaacaaaatcggtttttggcgaaaaaaacatcgttgaagtcattcacagcatgtcacgcttggaaaatgtcaataccacttttccccagagcaaaaccattattgatggcatgagtgtgagtggcatttcaacccatgacatgcaagtgctgttaaatctaaaaaatgcgtggcaatttattttatcatcggacagtcaatttgacttggcatttgcgtgcaaagtcaatggttttgtggcatacaatgaaagtttggcgtggggcgagctaagaactggcaatgtttgcattagtggcgtgagttttgtgccagacattctgcttaaaacaaggttgaacaagcgttaaatgaattgcatagcaatgatttgtgccaattacgaacttatcatggcaggttgtggcatgttaaatatcaatgaaaatcaacttgaaacatggcatatttatatttttaatttcaatggaaaaaacatcaatgacaatgattttaagcattttaatcctattttttatcatcagactgttatttttagccgtctccattaaacatgaaaaagccttgattgccaaaggggcaatacaatacggaaaaaccaattctacggtgcttgcggtggttcatacgctttattatttggcatgctttatctcggtatggctttctgacactgcttttaatggcatatccttggttggcacgctgatggtaggtgcttcatttgtgatattggcgttgattatcaagcagttgggggagatttggacggttaaaatctatattttgccagaacatcaaattaatcgttcgtggttatttaaaacatttcgccaccccaattattttttaaacatcatacctgaactgattggcatcgccttattgtgtcaagcgtggtatgttttattgattggcttgcccatttatttgctggtcttatttaagcgtatccgtcaagaagaacaagcgatggcaacacttttttaacccattttatcaatcaaaaaaattatcaataatttatcaacaaagagaaccgccatgccaaagcgtaccgacattaaatccattcttatcattggggcaggtcccattgtcatcgggcaagcctgtgaatttgactattcaggcgcccaagcctgcaaagccttaaaagaagagggctatcgggtgattttggtaaactcaaatcctgccaccatcatgactgacccgtccatggctgatgccacttatattgaaccgattacctggcagacggtagagcaaatcattgccaaagagcgtcctgatgccattttgccaaccatgggtggacaaacggcacttaactgtgcgcttgaccttgacaaacatggcgtgcttgccaaatatggctgtgagctgattggggcgaccaaagaagccattgaaaaagccgaagaccgtgaactgtttgataaagccatgaaaaaaatcggtctggaatgccccaaagcagaaattgcacagagcatggatgatgcttttgccattcaagctaaggttggttttccgtgcattatccgcccatcattcaccatggggggttctgggggtggcattgcttataaccgtgaggagtttattgagatttgtgagcgtgggtttgacttatcacccacccaccagctgctcattgatgagagtttaatcggttggaaagagtatgaaatggaggtggtgcgtgataaaaaagacaactgcatcatcgtctgttccattgaaaactttgaccccatgggtgtacatacaggcgattccatcaccgtcgcccctgcccaaaccttaaccgacaaagaataccaaatcatgcgtaatgcgtccatcgctgtgttgcgtgagattggtgtggagacaggtggttcaaatgtccaattcggcatcaatccaaaaacagggcgtatggtggtgattgagatgaacccacgagtcagccgttcatcagcattggcatctaaggcgacaggctttcccattgccaaaatcgctgccaaacttgccgtcggctataccctagatgagctaaaaaatgacatcacagggggcaaaactccagcgagttttgagcctgccattgactatgtggttaccaaaatgccacgctttaactttgaaaaattcccccaagctgagagcgtgctaaccactcaaatgaaatcggttggcgaggtgatggcaatcgggcgtaattttcaagaatccatgcaaaaggcactgcgtggtctggaaataggggtgacaggatttgatgagcaattagactttgaacaaaatgatgacagcatcatcagcaccttaaaactcaaactcaaaacccccaccccagaacgcattttttatatcgctgatgcgttgcgttttggcttatcggttgatgatgtttttgctgacaccaacattgacccatggtttttggtgcaaattgaggacattgttcatacagaaaatcagctaaaaacccttggcatgggcgacttaacccccaatttgctacgccgtcttaaacgaaaaggactctctgatgcacgcattgccaaattgatgggcgtgtctgaaaaacaatttcgcaaaacccgttggaacatgggcatttatcctgtgtataaacgggtggatacttgtgccgctgaatttgaaacatcaaccgcttatatgtactcaacatatgatgaagagtgcgaggccaacccatcaaataaagacaaaatcatggtcatcggtggcggcccgaaccgtatcggacaaggcattgagtttgattactgctgcgtccacgccgcccttgccatgcgtgaagatggctatgaaaccatcatggtgaactgtaaccctgagaccgtttcaaccgactatgacacatcagaccgtttgtattttgagccaatcaccctagaagatgtgcttgaaatcgtacgcaccgaacagcccaagggtgtgattgtgcaatatggcggacaaacgccactaaaacttgcccgtagcctagaacaagcaggcgttcccatcattggcacaagtcctgatgccattgaccgagccgaagaccgtgaacgctttttgcagatgattaacaagctaaacctaagacagcccaataacagcattgtcaaatcatcagaagaaggcattcgtgaggcggcgaaagtgggctaccccttagttgtacgcccatcatatgttttgggtggtcgtgccatggaaattgtctataacgaagatgaacttaaacgctacttgcgtgatgcggtgcaagcgtctcatgaagcgcctgtcctgcttgaccatttcttagatgatgccattgaggtggatgtggattgcgtatcggacggcaaagaggtggtgattggtggcatcatgcagcacattgaacaagcaggcgtgcactcgggcgattctgcttgctccattccgccttactcattaagtgatgacattcaagatgacatgcgtcgccaaaccgtcgccatggcaaaagagcttggtgtggtcggcttgatgaatgtacaatttgccatcaaaggcgaaacagtctatgtcttagaagtcaatccaagagcgtctcgtaccgtgccatttgtctccaaatgtatcggcgtgtctttggcaaaagtcgccgctcgctgtatggcaggacagactttggcagagcaaaacttcacccaagagattgtaccaagtcattattcagtcaaagaagcggtatttccttttgccaaatttccaggcgttgaccccattcttggccctgagatgaaatctacaggtgaggtgatgggtgtggggcagacctttggtgaggcgtattataaggcaacactgggcagtggtgatagattgacagggctgccacaagagggggagaccaaaacggtctttatctcggtgcgtgatagcgacaaagcgggcgtggtagatgtggcaaaacgcttggcaggctttggttttaacatcgttgccacaggcggtacacatgatatgctggtaggtgctggcgtagcgtgtaagcgtgttaataaagtcagtgaaggtcgccctcacatcgtggatatgatgaaaaatggccaaattcaccttgccattaataccacagagggcaagcaggcattaaaagactcgttcccaattcgccgtgaagccttgcaaaataaaatactggttgcaaatacactcaacgcagggcgtgcggtgtgtgaagcctatgagacgactttgccgtttgatgtttataagctgcaagatttgtatgcttcataaaagtattgggataaatttgtcacgcatttgtgttgagcaaatttatgttacttgatgcaacttaatatttgtactttggagtatttaccaaattaagcttgcattttttctaaaactcagtacaatatattaataaatctgatttaacaaaatcttgccagatatcgtatttggcaagtttttttacatttttaatatttttatttaaatgattttttgggttaatgtttgatgaattaacttaaattgatttaaatcataaacattgaaaggaaaattatgcaacgctatccaatgacgccagaagggcacaaagcgcttgaagatgagctaaaacagctaaaaaccgttgagcgtccacgcattaccaccgcaatcgccgaagctcgtgaacacggtgatttaaaagaaaatgccgaataccacgccgcccgtgagcaacaagggttttgtgaagctcgcattcgtgacatcgaagccaaacttagtggggctcaaatcatcgaccctgctaaactgcccaaagagggacgagtggtatttggggtgactgttgtgcttgaaaacatggatgatggtgctaagcgtcgctataaaattgtcggtgatgatgaggcagactttaaagtcggtaaaatctcggtcaattcaccgattgcgcgtggtcttatcggtaaatctgaaggtgatgaagccaaaatccaaacgcccagtggactggctgagtttgagattttggaagtgatttatgcataatcattagagatttttatgaaacatttacacatgcttttggcgattattgtgctgtttatttttatattacaagcattaccaatgtttatgggcaaaacaccaaaagcatccaataccctcaaaatcttaaatcatgtattttatacagcggttattttgactggattgggattattttggcagatttatcaggttgcaggtactcagcattgggcacttgccaagttggttttactgattgttgctgcgtccgccaccattaaggcacagcgtcattataccaataccccatcccaagccaaagcaggactgatgattgcttcggtggcttatgtgggtattattgtattggcgattactaagccaacgctattttgattgagtcatctgaatttacagttaaaacggctaaaggtttttagtcgttttttgataattattgatttataatattaatttaaaatattataaattatattatgctgttatttttattttggcaaaaaactttgacaaaaaaatacaaaagcccaattattgtgggttttgcgttaactgctcccatgttacaatagggtatttgtcattcaaatttggacaaaatcatttgccaaatctgcttaataaatcattcggtactggagtatgactgtgacgatagcaatcaattcacaaaatcaaaaacccatcaagcgattgggcttgatttttggtgtgatcaccacttgcattttggcaggatgtgccagtaagccaacctataatagtacctcaggttcgggcagtcatcgtacttcaggttcaggtggtttggcaataggttcacaggttatcacggacagtcagggcgtaccaaatcgctatcaggtgaagcagggcgatactgtcagtaagattgctcagcgttatggattaaattggcgtgagattggacacattaataatctaaatagcagttatacgatttatacaggtcaatggctgactttatggtcaggtgatctcaaggtgcgtgagcgtagtatcagctctggtgtgaatacagctcacacaccttcgcctgtggcggttcagtcaagcagaccaccagtacagcagcatcctgccgtacaaaaacccacgccacctgttgttgtggtaaaaaaacccacaccgactccgcctgtggttcagcagccagcaccagttgccccaccagtgacagaagcaccatttgccacgggtagctcaggggtgatgcaatttcgctatcctgttggtgcgaccaatccagtggttcgacgctttggtacggcgacagtggccggctcaactgttaccagtaatggcatgtggttttctggacgagatggcgatttaattaacgccagtaatgcaggcacagtcattcaagctgatcacaatatggacggggcgagtattgtgattcagcataccaatggatttgtttcaagctatatccatattaaggacgctcaagttaaaacaggcgatacggtgcgtaccggtcagcgtattgcaagcatgaaaaatcagccaagcggtgcggcactatttgaatttagaatttctagaaatggcgtgtatgttgatccattgacagtacttaaatagctttatatataagctagccagattttatatcttagttagctttgcttaaattcccaagatgattttatttgccttaataacctgagtaaaaaataccgaagtataaatcttcggtatttttatttttatttattcataaattttaatataagcacttgagcgtaattcttgcaaccaatcttcttgagcctgtggtgcgtgcgcaagaatagatattcgtgtgcagcgttgcgtcgatattgctcggtaatatcatgttgtttaatatcgttgacttttaggatatgccaaccaaattgagagcgaaatggtgttgaaaaatcaccttttgctgtatttttcatcatggtttcaaattctggcaccatatcgccttcattaacccagcctaaactgccatgttgtgaagctgaacctgtgtcatctgaataagttgccgccaaggtcccaaaatcggcaccttgttgtaattgttgataaatggcattgattttttgttcagcgatatcactgctttgattgctatcaatacgagccaaaatatggctggtttgccatttaggtacgatgacttgattttgttgttgcttattaaccactttgacgatatcaataccatttacggtaacgatcggcgttgatgtttgtccaatagttagcttatctactttggcagcaatggctggcggtagagcggtggcattaatcagcccagtatcagcaccttgaagatcgggcgtataatcaccacgagcattttgcatggcttgatccaaattcatgccagcatctaaagaagatttaacacgctcagcaactaaggcggcctgctggcggttttgctcgctggcagtattatcaagataaggcacacgaatatgtaaaaggcggtactgaacttgatttaagcgtgctgattcaggactgcttaaaaaagcatcaatctgatcgtcggtaatacgtacacggctttgaatctgattttgccataatgcttgtatggcggcatcttgaattaagtttgcacgcaacgcaacataactgcctgcacgctcggcatcaagtttggattgaaactctgataaactattcacgccttgggattgggcaatttgtaataactgctgatcaatcacctcatcatttggaacgacaccagcacgattaatgatggcaagctgaagtttttcattgattagctcatctaaagccagcgtttgtgcttgatcttgagtgacattgccgccgtttttttggatttcagttgcgaccagctcagtggcttgattgagctcactttttaaaataatttcatcattgacaacagcgacaataccgtcatgactatttccgctgattgatgcttgtgacacaaggcttgtgcagctgatgacagcagcggttaaagttttgatgataaatttaccttgcattggataatccttaattgtgaataataaaatatcaacttaaatgcgtagagtttagcacttgtctgcttgagggtcaaaccaaacggcatagtatttgctgatatggtggtatgaattttaggctctatttgaggctacggctggcatgcatttagtaatcatgtctccaagcattttgaacctgatcatagcctagtaccttttcgctcaaaagtcgattcaaacgaccgccgccaccgataccgtttaggcgaacttctgccattactgcagtatcaggtgataaatgtggattgaaagcatcacgatagcgtcttgcatagattgacaaaccataacagcaatcttcataatttagccccatcaaagaatccatgacataatctaagttgtagtcgtattgtagttgacccatcatacgccagcgattattgattggaaaaatggcggaggcagtatatgctgataatgctgattgattaaaagcacgattttcttttcttttgacaatacctaggttaaataacttacgatcacttggacgatagcgaatttgtgccacaatactgctcaaatcataatttgttctaaatgaacctgatgcatcaaaccataaattatcttttggctgtaggctggcttgccatgccaaaccagagcttctgctgctatagctttcgctgtcattgataccaacacggatatgactcaataaaatctgttctgcgatcccgccttcaaagcgtgtcctgcccattttatctatataacggtagctgactgcaggcgtgacggcgtgtaaatcttgaatgcgatcatgacccaaaaaccagttattgttcaaaagctgctcatagctaagctgtgcaatttttgtctcaaaatttggtacattgtgttgatctttaaaaggcgtgtaagtatagtgtaatcttggtgtcagtacttgatagccacctgtatcttgatgcatgccaaatggtgcacccgctttttcaaaaaatagcccagcatccaagctgaccgtcggtgcaaataccgaatggcgaccatttttcttagcgatattttggtcggctaagctgtcttcgtcatagctggtatatagatgtgtcaggctaagttttggcgtcaaataaccccaagagcgaagcagtggataactggctgtgaattggttaaatattctaccaccgcttttttctggttcagagttatctttaatggattttttgaaataggcagaattatgaataccacccagttcaagaccgctgggtgtacccatccatatgcgaggcaaacgatagttgaccgatagctgtggtaggcgtgcatatggtctatctttgtctgtaattggccgaccatctaagccaaaaccgtctaaacgctgaaaatcttcaaatcttaaatcagctgagacattttcatccaagaagcttgtgccgatgcgtcttggtagatttagcttagcactctcaacacccaaggcattaaagtctgataaataattggcatcagaaacagattgatattgtgcgtaagtggtaattttatcaaactgcttgggttgccatgtatgatcaaattgtattcggctacggtctttatcatgatattgctgatcttttggaagatacgaagcagtcaacacccctgatccataatcttgggtcagataacgaaattcgccagtcagcataggattgcggttagtaaatacagttggcgtaatggttgcatcataatttggtgccaaattcagataataaggcgtactaatttcaaaactgtccgatgcaccaaatcccattgatggtaataaaaatccagaagagcgacgagcatcgatcggaaagttaaaatagggcaggtaaaagacaggtacttttttgatacgcaaggtggtatttttggcgatagcacgacctgtatcggtattgatatcaatgctatcagtatctaagtaccatttgcgttctgtgggtggacaggtggtgaacatgacatgttgaagccgatattcgctactgcttattttatccatttgactggcataaccgtgagcattgatggtagtgcttgcaaaagcaacatcttgtgcggtcgctgtctgaccatctgtatggtatactaagttttcagccatgccaataatgccagcactgtgatcacttgcaccgccatcactaaattgtacttgacctgacgcagtggcttgccctgtttgggtgtctaaagtaagcttatcagcggttacacgccgaccgttttgttccataatgacattgccagacagttcggcataagtttgagcgtcataatatccataatcagcttgagcaaaaataccatcttctgtaatcggattaccattttcatccagttttggggtggtagggcggtttgtgtgtgttgcttggtggattggctgcatccacataccctgacaacgatgagcgtctggatcggacttaatatggtagttttcggctaatttggctaagcttttactggcagagggtgtatcatgcttatccgtcagcttggcagtgtttaaacttggattgtctgacttactagcaaaggcgtcaagctgactcatctgatgattgccttgatttgcttgactgcttgtctgctcggctgcctgctgtgtgataacttcaaaatcaaagccatcaaaggcattggcagtatcatcatgactttgtagatgggcgtctaaggctaagacagtattgggtttggtatttggtgtatcaggcaaattttttgagctgtcagcaccaacgactgtcagtgaacggctggtattgagttctgcataagttggtatgacaaatggcaaactggcgataccaaatagtgcgtaacgaatagcggtagtcaaatatgtctttgagcgatggtgatgagcggtgtgcattaaacttgcacaaagaatacgagagcgaatcacagccaaaccttacgaatacagataaatttttgctattttacaccattctgagcgtttggtgcgattattttatcggttttatggatgaaattttaatctaagtatgatgagatacttggtagagcaatcaatgtttgacgacgctttttagacaaaagtttgtcaaatgcttgattattttgtataacgatactggtttaaaccaccaaaatccgctaaactgtcattttgatatcaccaacagttgagaaaatttatgagcgatgtacgccacactcagatgatggaatttttaaatgcaaatttggcgaccgactttcgtgtagaaagcttatcgggagatgccagttttcgtcgttaccaccgcatttatttacccatgcgtggcgaggtgggcggtcatgagatgacatatcttttgatggatgcaccacctgataaagaaagtattcaagattttatccatgtggcaggtatcatgagcgaaacggtaaatgtacctgatattatggcgtgtgatgaagcgatgggatttttgcttttacaggattttggtatggtggagtttgcccatgccattgccaaagacactgataacaaagatggctattacaccaaggcgttacagacattggctcagctacagacgattaagggagctgatttgcctaagtatagtaatgaaaaattagcccaagaaatggacttatttagcgagtggtttttaccttatttgggaattgggctaactcagaaagatgctcaaaaatgggaaagtttaaaacaaacactcatcatgcagattaataagcagcctcaagtgattgtacatcgtgattaccacagtcgtaatttgatgatggataagggcagtgatcatcttggtgtgattgatttccaagatgcggtgattggtgcgtatacttatgatttggtcagtctggtgcgagatgcatatattgattataatgaggtgtgggcccaaaagcgtatgcatgaattttatcaattgattaaacccagcgttgatttgggaacttttatttcacaaaccaatataatgggcatacagcgtcatttgaaagttttggggatttttattcgcttgtcagagcgtgatggcaagcaccgctatcttaaaaacatccccaaggtaatgagcgacttggtggctgagctgtcttggctgtctgagcgtagtcatgatgcgatttatggtgaatttatggcatggcttaaaaatagcgtactacctgcttatagcaccaaatttgggtacttatcggagcggttatgattcagcaagcgatgattttggcagcaggtaaaggcacccgtatgcgtccattgacgctcacaaagcctaaacctctgattccaattgctggtaagccgctgattgtatggcatatcgagcgtttggcgacggcaggtgtacaccgcattgtcatcaataccagctatctatctgaggtgttactcacagaacttaagacactcaatttatctaaaaaatttggcattgagattttactttctattgaacaaggtgagccacttgagactgcaggcggtattagatttgctttggatcaaggtttgttgtgtgatttgccattttatttgaattaatggcgatatttggacggaatttgagtttgatcggctggttcatcatcagcttaataagcatttggcacatctaatcttggtggataatcccaagcatcatcctgagggtgattttgggctaatcaaagaaaaagtatgcttaaaaagtgatgatcataccgcattaacctttgcagggatgagcgtcatgtcgcctaaaatcgtggcatcactgaaccaagggcaaattgcaccactggcaccctatttaaaatctgccatcaatcagcagttggtgagtggcgagcatatgacagatcactggatggatgttggcacgcttgataggcttgccaggaccgaagcctatgtccaagatcaatatgctaatgctaaaaaatatcccgttaagtatcaagaacatgtactatttatccaacatatcatataatttatccaaaaagtatttgacactgtgataaatttctatataatacgcac

SEQ ID NO: 28 - DNA, 49617 bp, Moraxella catarrhalis
ctattttcatcgggtttttaatttttatcatgtgggatatttctttaaaatcagatgctggccgagcggaaacgttttggattattgtcgctttgcgcatgggtttttctggttttcttgccaaacttgggattgaatttgggcttggaaaatgggtattgtaacttaatttgagcattttaaaagttagtggctgacttgatagtttaaacagtctttaattttggagtaaaggtatgaaaatttttgcagtaactgccttagcatttgtcactttgatgttaaccgcttgcggtcacggtcatgaaaaagtacatgctattgaccgtgttgaagaagcacaagcagccgctttggccaatgctccaaaagccgaagacatggtttttggtgatgaaggtgtatctacaatgacgaccgagacagctcaagcggatgcaagtgctgatgtcacagctcaagaagatacccaaatggcggatgctaatgcaaccgtagagcctaccgaaactcaagccaactgatatcttctttggtcaaattttgatttgattgaaatagggcagtttggatgaataataaagccttggtcttaataaaagccaaggttttattatgatgaccaaatcagttttggtattaaactcaagcggcagcttgggtcattaaaagcataaaagacccagtttaaatcagcggaagtggcttgatttttcgagttttgcttgatacattagtggttactattcgcataaaaggaaatgattatgccagcacttagaaaagatattgaccctgaaggattattggaattttctgttgtttatactgatcgtgcgcttaaccatatgtcggtgcagttccagcaggtgatgaaggatttatcttttgagttaaagtcactgtttcaagccgatgcacttgccatcgtgccaggttctggcacggcagggatggaagcagttgcacgagctttggcgactgatcaagatgctgtcattatcagaaatggctggtttagctatcgctggacgcagatattagaagcgattggtgttgccaaatctagccatgtgtttaaggcatgtcttcaagaaggcaagaacggtcagtttgtacctgctgatattaatgaggtgaccgcctatatcaaagagcatcggccgggcgttgtgttcgcccctcatgttgaaactgcctctggcatgatgctgtcagatgattatattcgtgcacttgctgaggctgtgcatttggtcggtggcctgcttgtcattgattgtattgcttctggatgtatttggctggatatgaaagcgcttggtatcgacgtgcttttatcagcacctcaaaaggggttgtcaagcacaccatgtgctggcttggtgatgctgtcacaggccgccaaagaagctgtattatcaagcacgccgtcaagcttttctttggatttaaaagcttggttaaatatcatgatggcttatgaaaatggtggtcatgcgtatcatgccaccatgccaaccgatggtctaaagcagctgcgggatactttgcttgaggcaaagcagattggctacgataacctaaaacaagcccaaatcaagcttggtcaagagattttggcaacacttcataaaaaaggcgtccacagtgtcgccgatccatcagctcaagcgtatggcgtgattgtttgccatgctttaagtgatgagattcacaaaggtgccgcctttgctaaggcaggtgttcaaatcgctgctggtacaccgcttcaggttggtgagccaagcgattataagagctttcgtatcggtttgtttgggcttgataaattgaccgatattgaaggtacgattgaacgctttaagcgtgcagtcgatcaagtgttcgtttaatccaaaaacaaaaataggcgatggtttgatgcctagcttgtttttgcttttggtcgtttggtaaatattgttaaataagattgactgatattttaaattatcatattaaggaaataagatggcttttaatttggcagcttatgaagacaacctaactgttgtcaaagattttgaacctgcgttattatggcattggtttagtcgtatcagtgcgacaccgcatccaagttttcatgaagaagctttggcgacggatatcatcgagtgggcgatagcacatgggctggctgctcgccgagatggcattggtaatgtgattattaaaaagccagcgaccaaaggctatgaaaatcatgagccaatcgccctacaggcacacttagatatggtaccccaagcgaatgaaggggtattgcatgactttgccacagatccgattcgtctgcgtcttcgtcctgatgataatgcatggctgatggcgacaggcacaactttgggggcggataatggcattggcatggcaagctgccttgcggtgcttgaagatgattcgctggtgcatcctgagcttgaggtgctactgacgatgactgaagagacaggcatggttggggtagttggtctaaaagccaatgagctggcttcaaaaatcatggtcaatactgataccgaagaaatcggtgaggtgtatattggctgtgctggtggtattgatgcagatctaagcttgccactgatgtggcaaaaaaatccctttgatgcgacactaagcctaaccattaaagggctgcgtggtgggcattcaggactggatattgataaaaatcgtggcaatgccattaagttgatggcaagagtgctggttaagcttttgggtcagttcgatggacaatttgccatcagtcacatcaaaggtggcacgctaagaaatgccattccacgagaagctcaagtcgttatcagttgccaacagtcatctttatccgcactgatagataccatcaatgacgccactgctcaaatctttgatgagctaaagcaggctgagccaaacttgatagccgttatcgataccactaagcttgggcctaaagacaatgtgctaacttgggcgtcatcttgtcaagccatccatctgatcaatgcactgcctagcggtgtggtgcgtcaaagcgatatcgccaaagacactgtggagacttcattatcctttggacagcttaagatggatgatgatgtacttaaatgcgtgctgcttatccgctctttggttgattcaggtaaagaggcggtttgtgatacgctgtcaagtattgcccatctatcaggtgcacagattacttttgctggcgactatgtgggctggaatccagataccgattctgtaattacgccgatcacaacacagctttatagccagattttgggtcacgagcctgatattaaggttatccatgcagggcttgagtgtggcttgattaagcaaagccatcctgatatggacattgtctcaattggtcctaccatcaaaaatgcccactcacctgatgaaatggtacatattgggtcggtggcggtatattggcgacttttgaccgagattttggcgaatgcaccacttaaacgctaaatcatcatttgccatttcataaaaccatctgcttactcttaagcagatggttttattttagtgattgggtgaattcagtatcatttataaggtatcattcataaatacaatcattttagcccagctttctttggcagcttgggaatgatagcccaagtcaataccattatcacgagctcgttcatcagcatgtggattgctaaagccgtgtttggcaccgtcatagatatcaacttggtattgaacatcagcagcttcaagttctttttttagatcatcgattgcttgcattgagaccatggaatcctctgcaccatgtgcaaccaagactttggcgataaacttttgtttggtggcaggtgtgatggcggcaggattaccatgaaatgttgcgacagctttgagcggtgtaccaaggcgtgccatatccagagcaattttaccaccaaaacaaaatcctgcgataccgatacgctctttgtctacttcgggtaaattggccacatcttggtaaatggcttgacagcggttcataagttcatcagaatactcaagcatctgagacatccattcattggcttgatgagcgtctgttgtcatcttaccctcaccataaacatccattgccactgccacaaatccctcagcggccaaacgttcggcgactgtttttgggtgatcggcaacaccccaccattcaggagcaaccaaaattgcccgtgccttgcctgtcttggtggtatcatttggcagggcaatgtggctaagtagtggtgtgccatcaggtgcggtggtggtgagtgtacgattcgttattgtcataaaattatccttttgggttggatgatatcaatgaaataccctacggttgtatggaattttatccattgtaccacggtattggtctttttaaattaacaagcagcttctagcaagtcaaagtttttatgcctattttttcagattttaaggtacaataaagccaattgttaataatatggtattgtcatgatttatgatgaattgcgaccaaaattttgggaaaattatcccttagatgcgttaacagatgctgaatgggaagcattatgtgacggatgtggcgcgtgttgtttggtgaaatttcttgatgatgacaatgttaaattgaccgaatataccgatgttgcctgccagctattggattgctcaacaggattttgccaaaactatgccaagcgtcaaacgattgtgccagattgtattcgcttaacacctgatatgctgcctgatatgctgtggttgccacgccattgtgcttataagcggttgtatcttgggcaaaatctgccagcatggcacaggctcattaaacatagccaaaaccatggtgcaggatttgcgaaagtttcaactgctgggcgatgtgtgagtgagcttggtatgagtgatgaagacatagaaaggcgagtggtgaaatgggttaaaccttgacatgattgttgacatgattgacagacaataaaaattggcaaatttgataaaattggtgtatgtgtgtgattttatcaaaagcacttgaataaaaccgagtgatacgctaaattgtagcaaaccaatcaattcatcataattttaatgaacacgaggttaaattatactgtctatgtctgatgacaattcaagcacttggtcgatgcgtggtcttaggcgttggttatccaccgcacctgaaactcgagatgatttattaaagctggttcaagactctcgccagtttttagagcctgatacggttgatatgcttgaaggggtgcttgatctgccagcaacccaagtgcgtgagattatgacaccacgcccgcaggtgcatgcgattgccagcgatgatgatttatctgatattttatcggtggtgcttgaaacagagcattctcgctatcctgtttttgacagtttagatgatgatgctgtggttgggattttgctgattaaggacttaataccatacctaaaagccaaagctgacggtaaagagcagccgctcaaattggctgatattgtacgaaagccgttgtatattagcgagacggcacgctcagatacactgctacgctcacttcaaaaagcccaagtgcatatggcgattgtggttgatgaatttggctcggtctctggtgtggtgacaatggaggatttgcttgaggagattgtcggtgatattgttgatgaacatgatgatattgacgaggacagcgacattaataacatcattccacaccctgataaatcaggcgtttggttggtgcaagcttccacactcatcagtgattgcaatgagattttaggcagtcattttgatgatacagatgttgatacaatgggcggtttggtcatgcaagcattgggctttgttagccatcttcaaggtgcggttgttcaaatcgatgaatggcaaattaccgtggttgatgttgaggcacgatttattcatctgttggagcttgtgctgataccacagcttgagaatgctgaataaacaaaaaccgaattgataatttcattcggtttttgttgtgacttggtaggtgtgataaagcctatgttaaagctagttgcggccaatgtcttcttgtaaggccttgggcaggggtagaatttcaactgtcgttaaatcctcagggcgggcgattaccaaagcctcaaaacctgtatcggttgcgagcgcattaacgatactcatacgccccatattaccgccagtaggtgggatagcacccacccccaagatgcggtgtagataggcctttgggcgagccttaaaatatagccgtgcaataatctcttgtcccaaataacatcctttatcataagccacaccccctttttggtgtaggcgcagctcttggggttgatacatctcactggttttggcagtcagccaataattacctgttttgatgcttaattgctcccaaagcttggtatcggtttgctgggttttattaaaagtgggtatgtcatcgatcacatcaggataaatggggttggctgatgatagggtaattttggaaaatgccccatattttttaatatgcatgataaaattatctgccatatcagaactcataacaatatcaaagcctgccaaagttcgtgcaatccaaatcccaaattgtacacgcccttttaaattacaaattgctgtcggtaaaaactgctcaccaatatcagcgatattagcagtaatttgcccttgtaagaatttttcactgtctgtaccagtcatttcaaaataacaaaaatcagtcatggtttgtctcttattcaaaagttgtcataataaatattggggctattcatcaaattataggataaatttgatggcagatgttaaattttttgtacaaaataccagccaacataacacttaaaccccaaaatcggttacaataagcagttaagttttttatcaaaaattaatttaaggtgaaatcatgaacttacctgactgtccgcaatgtcatgaatcttatacctatgctgatggtatgctgttgatttgcccaatgtgtactcacgaatggcaagagggtggcgagaccgaggcactgcctatcatcaaagatgctgtcggcaatatcctaaatgacggcgatgcggtcacggtggttaaagatttaaaagtgaaaggttcaagcacaccaatcaaagttggcacaaaagttaaatccattcgtttgatttatgatgcgccagatgaccatgacattgattgtaagattgatggttttggtgcgatgaaacttaaatcttcggttgtcaaaaaagcctgattctctcaactttagttcatttatcataaggacgcagtcatgacacatatccgcccagccaatgaaaaattgtttaatgatgccaaacgccatattgcaggcggtgtaaattcacctgtgcgtgcatttgctggtgtagggggtgtgccagtatttgtccagcgtgcaaagggtgcgtatatttatgataccgaaaataacgcctatattgactatgttggttcatggggtccgatgattttgggtcatgcacatgatcgagtcatcgatgcggtgaaggctgctgctgaagatggcttgtcttttggagcaccgaccccatctgaaacaaccatggcggatttgatttgtcaaatcatcccaagtgttgatttattgcgtatgacaagctcaggcacagaagctaccatgagtgcgattcgactcgctcgtggctatacaggtcgtgataaaattgtcaaatttgaaggctgttatcatgggcattcagacagcttgctcgtcaaggcaggttcggggatgctagatatcggcgagccgacatccaaaggtgtaccgattgattttgccaagcatactgtcactttaccctataatgatatcgaggcattgacagcatgttttcatgaatttggtcatgagcttgcgtgcgtgattttagagccaatcgcaggcaatatgaacatgatcattccaacccaagcatttcatcaaaccttgcgtcaattgtgtaccgagtacggcgtggtgctgatttttgatgaggtgatgacaggatttcgtgtcggtcttggcggtgctcaagcgcattttggcattacgcctgatttgacaacctttggcaagattattggtgcaggattacctgttggtgcatttggcggtaagcgtgaaattatggaatgcattgcaccacttgggggcgtgtaccaagcaggcacactgtcaggcaatcctttggcaatgcgtgctggcaaagcgatgtttgatgagctgatggttgatggattttatgagacgcttggtcaaaaaaccacatatttgattgatggcttaaaagccgcggcagccaagcatcaagtagcttttcaggcatgttcggtaggcggtatgtttggtatgttcttttcagacagtttgcctaagaattttaatgatgtggcaaatctttgcgatgcccaaaaatttgccaagttttttcatggtatgttggatttgggtgtgtatcttgcaccgtcggcatttgaagcggcatttatgagtgcggcacatacttatgaagatttggataaaaccatcaaagcagcagagcaagtatttttacagctatcacaagcgtcatgagcggtatcttaccctcaatcgttagcggtattttaataaggtatgcccatcttttgtatttgcaataaaaatcagtttggctatttttatgtataagtcattattttatttttatcaatttttaaaatgaaaatgatgttataaaggataggcacatcttagataaattggtcaaaattcacacaaacattggtggggtatgcagatgaattttattgttaaatggtaaaaagtcatctaatcgcactgcccatttacccattagaatggattgtttatctattcttgacggaatatttagtatgcttacaaaaattatcagtacagtcattggtacaaaaaacgaccgtgaattaaagcgtatgcgtaaaattgttaccaaaataaacagttatgaatcaagcattcaatcgttatctgatgatgaattacgccaaaaaaccgaagagtttaagctgcgtcatcaagcaggcgaaagcctagataaactcttgcctgaggcgtttgctgtttgtcgtgaggcgtctaagcgtgtcaatggcatgcgtcattatgatgtgcagttgattggtggcatggcattgcacgaaggtaaaatcgctgagatgaaaacaggcgagggtaagaccttgatggcgaccttggccatttatctaaatgccatcagtggcaaaggggttcatgttgtcacagtgaatgactatttggcaaaccgtgatgcacaactaaatcgcccgttgtttgattttttgggtttgacagttggtgtgatttatagccaacaagccccccaagaaaaatttgccgcctatcgagctgatattacttatggcaccaataacgaatacggttttgattatctgcgtgataatatggtgtttagcctaagtgaaaaaaaacaaagaccattaaactattgtattattgatgaaattgactccattttaattgatgaagctcgtactccgctcatcatttcaggccaagccgaagactcagcacatctgtatgctttgattgataatatcgttgagcgattggtgcgttccaaagatgaagaagataataaaaataatactgatggcgacttttggattgatgaaaaaaaccgtacgattgagattagcgaaaaaggctatgaaaaaatcgaaagctttttggcggaagtcggtgagcttggcgaaaatgaaagcctatacagcccagcacgattaccattattagcacatgcacaagcagcgatacgcgcacatcatttatttgtcaaaaatattcattatatcgttcaagatggtgaggtgatcattgttgatgaaaatacaggtcgtaccatgccaggtcgacgatggtcagatggtttacatcaagcggttgaagccaaagaaggggtagagattcaggcagaaaaccaaacgatggcaaccaccactttccaaaattatttccgtctgtatgataaattatcaggcatgacaggaacggcagatactgaagctgctgaacttaagtcaacctatgatttagatgtggtcatcattccgacacatcgaccgattgcacggattgatatggatgaccagatttttttgaccaagcttggcaaatataaaggcatcattcgtgagattaaacaaatcaccgaaaaaggtgcgcctgttttggtgggtactgcgaccattgaggcttctgaggagctgtcttatttattaaatcaagaaggtattgctcataatgtcttaaatgccaagcagcacgagcgtgaggcagatattatcgcacaagcaggtcgtcctcgtgcggtgaccattgcaaccaacatggcaggccgtggtacagatatcattttgggtggtaattggcaggccgagcttgaaacacatgaagtcatcaccgatgagatgcgtcgtgaggcactcacagcttggcaggcacgccatgatgaggtgttggcagcaggtggcttacatatcattggttctgagcgtcatgaatcacgccgtattgataatcagctgcgtggacgggcagggcgacagggcgaccctgggcaatcacgattctttttatcgcttgaagatgatttgatgcgtatttttgcaggcgatcgtattaccagtatgtttcgtgcagtgggcttaaaagaagatgaagccattgagcataagatggtttctcgtgcaattgaaaacgctcaaggcaaggttgaagctcgagattttgatgcccgtaaaagcttgcttaagtatgatgacattgccaatgaacaacgcaaggtcatctattcacaacgagatgatttattggcagagatggatttgcaagcaggtattcaggcgatgcaccatgaagtatatcacgccttaatcaatcaatttgttccgcctggctctatcgatgaccaatggaatattgatgggttagaagatgaaatcgaagaggcgtttcgttttgatatgccaattaatgattggcttgatgctgatcgtcgtttggatgaagagggtcttcgtgccaaaatcatcgaaactgccattgagcgttatcagactcgtcgtgagcaaatgggcgaacagacagccgcccagcttgaacgccatttcatgctaacaagcttagataggcattggaaagagcatttaacccaaatggatcagctcagaaaaggcattcatctgcgtagttatgcccaaaaaaatccagaacaagaatataagcgtgaatcatttgagctatttcaatcgatgcttggtgcgattaagtcagatttgattcaagatttggcgcgtgtacatgtgccaacgcctgaagagcttgccgccttagaagaacagcgtcgccagcaggccgaacaaatgcgtatgatgtttgagcagcaggcacagcttgatgatgttcaaagcttggataatcgtcctgctgaagaaacaccacgctcattgggtcgtatgacagtgactttaggcgctacttctgcaccacaagcggctgatacaacaacggatgaggcattggtgattcccaaaaatatccatcgtaatgcaccttgcccttgcggttctggtctgaaatataaacaatgccatggcaaactaagctagtcgttatcggcggtgataaattttggttgttgggcatttgggtatatcgctaagattagagctttataaaaaactgtgctatactaagctaattgtaaaccactctcatttaaaggatgtattgcttcctgagtttggctattgacttaaccagtgagggaataaccccatgaaaaaactcatttggcaagcgttagcattgtcagctatgattgtactgtctgcttgtgcccaaaaaaccaaagaggcaaccgccaagcctgttgaagaaaaagaagtgcctatgtcggctgaacctgccgagccaatgatcgttgtaccgagcgattcgtctgactcatcgattgagcaggtagtacctgaagcatttgctgaaggcgatagcacccaaatcgctgaagtgatagagattgatgagaccgccaaaactgccactcaggatgccgaagtccaagaagggcaataacaagctcttaacatggctaaatgacctaactattttaatcacccagcccaatgtatcatgggcgtgaggtgatttaatttcatcaacagacccactcacttctcacacttttactatgaaatcttagcttgtcatatgcgaaccgctaccaattctatccggcctaagaccaccactcgccagttgccattaccgatatcggtgatggcggctttgtctgctggtgcaatgtttagtttggcacttgcgccttattttattatccccattgcagttctctcaccaatgctgttgtatgcactgttaaaaaagtgcgatagccctaagcgggccttttggttgggtgagttctacggatttgggacttgggtggtcggtgcattttggctatatcactccattcactactatggcggagtaccaagttgggctgcacttgtattaattggggtaatgtcgctgattatggggctgtttcatgccttgatggcatgggcatttgttcgatttagtgccaaacagccgatatcttttgcaggattttggatacttcaagaatggctaaaaacttgggttttatcaggatttccttggctttttgtggggtatgcatttacagatgtcagttggctaaatggtattgcaccgatttttggggtgtttggcttgtcgtttttggcggtatttgttggggcggctgtgatcgagctattttatcgcaatattgggcatattatgattggcggtattttaacaaccgctgttatcatgatttcattgataggggtaaattggacaaagccaacaggtaaactgacttccgtttcactcatccaaggcaatattccacaagacctaaaatggcaagagggttttggtatacaaaccttggggatttatgcaggattatcacaatctgaatgggggcgtgatttggtggtttggccagaggctgccattccgctatttcaagacgaagccagcgaccacatcaatgctctagcaaaacaggcaaacgctgatggcagtgcatggataacgggcattatgtatcgcaagacaccaagcgatgcctcaaatcaggcagaattttataacagtgtgatgttatacgatgccaatcaagtatcagtttataaaaaacaacagcttgtaccatttggtgaatatataccatttggtggtttgttggatattttaccagggcttgagggtgtcgctagcctaagccgtggcgatgataagcaaccaccgctcaaattgggcggcggcgtgggcgatacgattggtgcggcaatttgttatgaggtggcatatcctgagacgacgcgtaaaaatgcacttggcagtaattttttattaaccgtctcaaacgatgcttggtttggtacaacagcaggtcctttgcagcatttacaaatggtgcaaatgcgaagcttggagacggggcgatggtttgtgcgtgcaacaaacaacggagtgactgcattaattgaccatcaaggacggattatcaagcagataccgcagtttcagcgagatattttgcgaggtgatgtacccagttatgttggacacacgccttatatggtttgggggcattatcccatgttggggttttctttggtgctgatttttcttagtatcatggcaaagaaaatgaaaaataccaccgccaaacgagaaaaattttataccgctgatggtgtggtagaccgctgaattgtgccactttgggcgttagagcatgagcaagattaggcgttgggtgagctttggttgtattactcatcagcctacccgaaacctgccaaacatcaccgcccaaaacctaaacatacaatggctaaaaatatcagaaaataacttgctgtattgtaaattcttatgttatcatgtgataataattatcattagtaccaagatatccattactaaacttcatcccccatcttaacagttaccaagcggtgagcggattatccgattgacagcaagcttagcatgatggcatcggctgattgtctttttgccttgttgtgtgtttgtgggagttgattgtacttaccttagtggtggatgcttgggctgatttaattaaatttgatcaaagcggtcttcacaacacaccaaacgagatatcaccatgagtactgtcaaagtcccccacattttctaccaaaaacgcacccttagccttgccatcgccagtatttttgctgccgtggtgatgacaggctgccgctctgatgacatcagcgtcaatgcacccaatgttacccaactgccccaaggcacggtttcaccaataccgaacacaggtcatgacaacaccaataacaccaacaatcagggcaacaacacggataacagcaccagcacaactgacccaaatggcgataacaaccaactgacacaagcacaaaaaactgccgccgccgcagggttttttgtgatgggtaaaattcgtgataccagcgaaaaaaatgacccagattataccaaagatttacaaggcagcgtacatacagcagggcaaggcttacagtacttaggcaccaaagagcctcggccagatggcacaggtacaggtaaaaacttacgccagcccatcacagctgatgacattacaccactttattttgataaattccccaaaatatccgatctgcacctagaaaacagcgagcatgtgtttgatgctaaaaaagcaaataacatcaaaatatatggttatggtgcattgtcatcacctgccaaaaacccaacctacatgaattatcaacaagaacaaaacatcaaaaacaaaaaaccaggcgatgattatcaaaacattcgttttggctatatggagctaagagagctggacctaaataaaaaaggtgcagacacccagagcgacaagaaccgtgccatcattttcaccacacctactttattttatcatggtgagaatgccagcacccatctgccaaaggcgggtaaatttgactatgagggcaattggttgtatctgaccgatgtcaaaaaacgcccatttttagataaaacagacgataaagtaggcacttattttaactcaaccagaaaatcaaatgaaggcgatttggtgagtgcagcacacatttatctaaacagctttaaatataaacacaccccggccacttatagcgtggactttgatcaaaataccctaaaaggcaaattgtcttattatgacaacccaaacaagcaaacagccgatgggcgttatatcagaagtcagtttgataccgacaaaaaggtcaatgaagccgatgtctatgagattgacgccaagattaatggcaaccgctttactggcacagccaaatctttgattgatgataacaccaataccgcaccttttgttaaagagctgttctccaaaaaagccaatcccaacaacccagaccccaactcagatacgctagaaggcgggttttatggtgagtcgggcgatgagctggcgggtaaatttttatccaatgacaacgcaacttttgtggtctttggtggcaaacgagacaaaacgaccgaacctgtcgccacaaaaacggtgtattttagtacaggatttgaaaaacccagcaccagctttgttggcaatgaagagattggtagcattattgacggtaaaaagttaaatgatgaagtcaataatcaaattgaagatgaaactgtccctgtcagtaataaagaatattatgaatataattatggacgacccaacaaacaattcaccaaaaaaataaacgccagcgtccaaaaaaaccctgcttattttggtcagcatgataagttttattttaatggtaactattatgacttatcagccaaagaagcaaacaagcttggtgtctcccaagataccagcaccaataagagtattttggctaaatacccagatgccaaagtaagcacagacaataaagttaccaaaatcgttctacaacaagccaaagataagccgtataccgccattcatgccaaaagctatgaccacatcagttttggtgaagtattgtataatgataacaaaggcaacccaacacgcagttattttgtgcaaggcggtcaagcggatgtcagtactcagctgcccagtgcaggtaaattcacctataatggtctttgggcaggctacctgacccagaaaaaagacaaaggttatagcaaagatgaggataccatcaagcaaaaaggtcttaaagattatatattgaccaaagactttatcccacaagatgacgatgacgatgacgatgacgatagtttgaccgcatctgatgattcacaagatgataatacacatggcgatgatgatttgattgcatctgatgattcacaagatgatgacgcagatggcgatgacgattcagatgatttgggtgatggtgcagatgatgacgccgcaggcaaagtgtatcatgcaggtaatattcgccctgaatttgaaaacaaatacttgcccattaatgagcctactcatgaaaaaacctttgccctagatggtaaaaataaggctaagtttgatgtaaactttgacaccaacagcctaactggtaaattaaacgatgagagaggtgatatcgtctttgatatcaaaaatggcaaaattgatggcacaggatttaccgccaaagccgatgtgccaaactatcgtgaagaagtgggtaacaaccaaggtggcggtttcttatacaacatcaaagatattgatgttaaggggcaattttttggcacaaatggcgaagagttggcaggacggttacatcatgacaaaggcgatggcatcactgacaccgccgaaaaagcaggggctgtctttggggctgttaaagataaataaagcccccctcatcatcgtttagtcgcttgaccgacagttgatgacgcccttggcaatgtcttaaaacagcactttgaaacagtgccttgggcgaattcttggataaatgcaccagatttgcctcgggctaatatcttgataaaacatcgccataaaatagaaaataaagtttaggatttttttatgtcaaaatctatcacaaaaacacaaacaccatcagtccataccatgaccacgcaccgcttaaaccttgccatcaaagcggcgttatttggtgtggcagttttgcccctatccgtctgggcgcaagagaacactcagacagatgccaactctgatgccaaagacacaaaaacccctgtcgtctatttagatgccatcacggtaaccgccgccccatctgcccctgtttctcggtttgacaccgatgtaacagggcttggcaaaaccgtcaaaaccgctgacacgctggcaaaagaacaagtacagggcattcgtgatttggtgcgttatgaaactggggtgagtgtggttgaacaggggcgtggtggcagcagcggatttgccattcatggcgtggataaaaaccgagtgggcattaccgtagatggcattgcccaaattcaatcctacaaagacgaatccaccaaacgagctggtgcaggctctggggcgatgaacgagatagagattgaaaacattgccgccgttgccatcaataaaggtggtaatgccctagaagcaggctctggtgcgttgggcggttcggtggcgtttcataccaaagatgtgagcgatgtcttaaaatctggtaaaaatcttggcgctcaaagcaaaaccacttataacagcaaaaatgaccattttagtcagacgctggcagcggcaggtaaaaccgagcgtgtggaagcgatggtgcaatatacctaccgtaaaggcaaagaaaacaaagcacacagcgacctaaatggcatcaaccaaagcctatatcgcttgggtgcatggcaacaaaaatatgatttaagaaagcccaatgaactgtttgcaggcacaagctacatcaccgaaagctgtttggcaagtgatgacccaaaaagctgcgtacaatacccttatgtctacaccaaagcccgaccagatggcatcggcaatcgcaatttttctgagttaagcgatgctgaaaaagcacaatatttggcgtccacgcacccccatgaggttgtctctgccaaagattatacaggcacttatcggctattgcctgaccccatggactatcgttcagactcgtatttggcacgccttaacatcaaaatcaccccaaatctggtcagtaaactgttattagaagacaccaagcaaacatacaacattcgtgatatgcgtcattgtagttaccatggggcaagattgggcaatgatggtaagcctgccaatggtggctccattgttctttgcgatgattatcaagagtatctaaacgccaatgacgcatcacaagcattatttagaccaggtgctaatgatgcccccattccaaaactggcttatgccagaagcagtgtgtttaaccaagagcatggcaaaactcgctatgggttaagttttgagtttaagcctgacacgccatggtttaagcaagcaaaattaaacctacaccaacaaaatatccaaatcattaaccatgacattaaaaaatcgtgcagccaatatcctaaggtggatttaaattgtggcatcagtgaaattgggcattatgaatatcaaaataattaccgttataaagaagggcgtgccagcttgacaggcaaacttgattttaattttgacctgctgggtcagcacgatttgacggtgttggctggtgcagataaagttaaaagccaatttcgtgccaacaaccccagacgcacaatcattgacaccacccaaggcgatgccatcattgatgaaagcacgctgacagcacaggagcaagccaaatttaagcaatcgggggcggcatggattgtcaaaaatcgccttggacgcttagaagaaaaagacgcctgtggcaatgccaatgaatgtgaacgcgcccccattcatggcagtaaccaatatgtgggcattaacaacctttatacaccaaatgattatgtggatttaagttttggtggacgcttggataaacaacgcattcacagcaccgattcaaacatcatcagcaaaacttacaccaacaaaagctataattttggagcggcggttcatctgacacctgattttagcctgttgtataaaactgccaaaggctttcgtacgccaagtttttatgaactgtacaactataacagcaccgccgcccagcataaaaatgaccctgatgtgtcttttcccaaacgagcggttgatgtcaaacctgaaacttccaataccaatgaatacggctttcgctatcagcacccttggggggatgttgagatgagcatgttcaaaagccgttacaaggacatgttagataaagccataccgaacctaaccaaagcccagcaagagtattgtaaggctcatttggattccaatgaatgtgttggcaatccgcccacgcccaaaaccagtgatgaggtatttgccaacttatataatgccaccatcaaaggggtgagtgtcaaaggcaaactggatttgcatgccatgacatcaaaactgccagatggtcttgaaatgaccttgggttatggtcataccaaattggggaaatttgattacattgcacccaaagatgccgatggttggtatcaggctcgccctgctttttgggatgccatcaccccagcgcgctatgtggtcggtctaaactatgaccaccccagtcaagtatggggcattggcacaactttaacgcacagcaaacaaaaagatgaaaatgagctaagtgcccttagaatccgaaatggcaaaagagaaacacaaaccttaacgcacacaatacccaaagcctataccttactggacatgacaggctattatagcccaactgagagcatcaccgctcgtcttggtatcaacaatgtattaaacacccgctacaccacatgggaagcggcacgccaactgcccagcgaagctgcaagcagtacccaatcaacccgttacattgcaccaggtcgcagttactttgccagtcttgaaatgaagttttaatatgacctgtttaccaaagaccaaccctgctttaaaagtcaagcacagatttttaaagcaggtgctgttattgctttgtgttgatacattaacagcacaggcgtacgcccacagccatcatacgcccattcatacacccacgcatgagctgccatctgctgatgctttatcagatgaaggcttgggtaaggatttgggcagtttggacagtttggatagcccagatggtttgggtgatggtttaggcgatggtttgggtgatggcttaaaaagtgataaagcccctttacccatcaacgccttgaccgcccatcagaccaatgagagccagcctgccccaccgagcgtagatgtcaattttttacttgcccagccagaggcattttatcatgtctttcatcaagcgattgtgcaagatgatgtggcaacattacgcttgttattgccattttatgaccgcctgcctgatgattatcaagatgatgttttgttgttatttgcccaaagtaaacttgccctaagtgatggcaataccaaattggcattgaatctgctgaccgatttgagtaacaaagagccaacacttacggcggtaaaattacaacttgcttccttgttgctgaccaacaagcacgataaacacgcccaaatggtgctagatgaactcaaagatgatgcccactttttaaaattaagcaaaaaagagcaaagatgggtgctatcgcaaagtcgctatttacataaaaaatataaaatgggcttggatttgggcatcaactatctgcatttggataatatcaacgccgcctccaccatcacccagcccaacattaaaaaagatgccccaaaacctgctcatgggcttgccttatcgcttggtgtgaataaatacacgccgcttagtcatggcatgagtatttatacagccctagatgttgatggtaaattttatgatgacaaaagccacaatgaactggcggtttttgctcatgctggactaagaaaagatcaccaaaaaggttatgttgatgtcgtaccttttgttgggcgtatttttgccaccaatcagcagcatggcagattatcccccagaaaagacagtcagggcgtggcgtttggcagccatcatcggatcaatgataaatggcaaaatgcgttttttgcacgcatggaaaaaggcaattataccgagcgttatcaaggttatgatggcaagcgttatcatgtgaatgacaccattttgttgcaagatggcccaaatcgtcgttactctttgggcgtggggtatcagcttagccatctgcaagatgcaacaaaaagcagtcatgccacaaagatacattttggggtgttgcaaagattgccaaatggtctgaccgtgcaaggtagagtgagtgctgagcgtgagcgttatcatggtaaattattgcgtctggttaatcctgatgatgtgtatcgcacagataaaaccctaaccctacaaacctccatttggcacaaagacattcactggcttggattaacgccaaagctgacttatcgttacagtaaaaataacagtaacttaccagcactttatagccataacaaacaaaatttttatttggagcttggtcggtcgttttaactcaattgcctaagggcaggttaagatggctgggtgtttttaatggtttttaatcttcaaagctgacttggttgtgaattttgacattttgggtttagacaactttgaattgataaaagtcattgtacaaaaagccatcatttgttatataataaggataattcattttaggtttcatcttaaattaaatcattacccatcttagactaaattaggcaggttacccatggcacatgatgcttcaaataataacccactcaaagaatcgctaacagcattgattggtactgtgctattgcttgtaatgattgcaggtattgcaatttcagcatggctacgcccagcaggcgagcatccagcccaagctgaacctgctgaagctgaagtcgccacattgcaaagtaattgactttttatggcttttagcccttgtgagtatcacaagggttttttattttatcgccctaaatcttaaagatttatcaggtggattgccttattcgtagaacaattgttcaaacttatgttaaaattaaacgctttaggcatataatataggtttatcattatcaaggaaaagttatgctaaattcgtcaaatagatatcaagagcgtatcggtcttgctcgtcaaattctggcagatgaaggtgtggatgcgttgattatcccatcagccgatccgcatatgtcggagtatttgcctaaatattggcagggccgagcttgggtatctggctttacaggttcggtgggaacgctggttgtcactcagacatttgcaggcttatggacagacagtcgctattgggtacaagcacccattcagctggcaggtacgggcattgaatttcaaaaaatgcagatcggacagccgacttttacacaatatttggctgacacattaccagctggttctaaggttgccatcgatggcaatgtattgtctgtaaatgagcatgataatttaaaaacagcatttttggataaagatattcagttagtaacagacttggatttgttgtcaaaaatttggacagatcgaccacagttaccagatgccgccatttatgagcatcctgctgagtttgttgatacaacggttgccgaaaaattagcacaggttcgtgctcaaatccaacaaaaacaagcagatgttcatctgatatctagccttgatgatattgcttggttgttaaatttgcgtggatctgatgtggaatttaatcctgtatttttatcacacttgctattagacgataccaaggcgactttatttgttgatatcaataagcttgatgacaaaatacgcacctcgcttgagtcgatgggcgtacaagttgctgaatatcaagcgattggcgatgcgattgctcaagtttcaggcaagctgttaattgatccatcacgcattgcgattggtactttaaagcggctttcttcatcggttgagctgattcgtgccatgaatccaagtacaatcataaaagccatcaaatctgaggcagacatcgaacatattcgtgaagccatgcgtcaagatggtgcggcactttgtgaattttttgccgaatttgaagccaaaacatcacttggcgagcgtatcaccgaacttgatatcgatcgtatgctcatcgaagcacgcagtaaacaaaagcactatgtttcacccagttttgataccatcgcaggatttcaagccaatggagcaattgtgcattatagtgcaagtgaagataattacagtgtgatcgaaggtgatgggctgttactcatcgattcaggtgcacagtattataatggcacaaccgacattacacgcatggcaagcgtgggtcaagtgagcgatgatgaaaaacgcgatgttacttatgtactcaaagcacatattggactggcacaagcacagtttcctgaaggtttggcgtcatcacaagtagatgcgttagcccgaatccatttatggcgtcagggtttagattataatcatggtacaggacatggcgtgggctattttatgaatgtccatgaaggtccgcaagtgatttcagtatttgctccaacaacgccagagcgtgtgcttaagcgtggcatggtaaccaccaatgaacctggattgtatcgtgaaggtcagtggggtatccgtttagaaaactgtgctgtctgtgttgaggctgatcgcagtgagtttggcacatttttaaaatttgatgatttgactttgtgtccttttgacactcgtctcattttgcccagccttttgaccgaagatgaaaaatcttggctaaatcactaccatcagcgtgtgcatgatgagctgattgatcgtgtcagtggtgcagctaaagactggctgattgaaagaaccaaagccatctaagacttaaatcaagcactattttggcttagacatttttgccaaaatagtgccaattttatcttggcattcttgatactcatcatcaacatttgatttgatggtaatgccaccacctgcccagatctcgcattcttgccatttttgtagtgtgcgaattaatacattccagctgcctgtaccgtcaaaattcatatagcccatcgtcccacagtaggcaccgcgaggtgaggtttcaagctcatggataatctcgcatgcccgttttttgggtgcacccgtgatagagccagctggcagcgagccgaataagacggtaattggatgcgtatcactgagcgtcgctgtaacagtgctgaccatgtgatgcacatttttaaagctttcgatggcgaaacgcttgggcgttttgaccgtaccaatttgtgcatatttgcccaaatcatttctgagcaaatccacaatcatcagattttcgctgatatctttttcgctgtttgcaagagattgtttaagctcatcatctataatagggtctgcatggcgtgggcgtgtgcctttaatgggcttggtgatcagatggattttaccgtttgttttgtaaaattcaaaaaatagctctggtgagatggagagtagttcaaattcccccaattgtaaaaatcctgcaaaaggtgcattcattgtgtcttgtaaatcaggcaagtggtttgccagacggtctaaatgagcatgccatttttgggttaggttgatttgataagtatcgcctgcttttagatattcttgggtttgataaaatgctttggcatactctgtttttgtccaaataggctgaaagtctatcggcgaagctgtgggcaggcaacgacataataagtcagataactgatgggtaatacgctgaaaaaattcagaacaaacgcccatgccaattaagtcatagccgtctttgatgggctgaagataaatatcataatgtgccaaatagccacaaggttgatttggcttgatggtaatgcgatgatttaactgatgtgctgataaatcatagctaataaatcccataaatccatgcacatagctgctatgatttaagccatgataatcatcgagattcatttgattggcatatgccgtcagctcatgctgccagttgtcataagtagatgggtagcgtcgtccatttaaactctgtaccccatctgcttgacgagtttttttgtgaatgtacagatttttatcaaaagtggctgtccatgcaaccttaggacaaatcccaatcacagggcgatgtgcattatttaaaaagcacacttgccaatcagggtgatgcgtcgtgatgagagctgtgatttgacttggggtgtatgtggtggcaaagtgatgttttagcattatcaaatggcaaataaaaatacaaattttaaagcaaaatacaaaaaagaaaaaggggagtggtctgattgttttagttcagtaaaatacttgaaaagttaaaccgttggatttgacaagatggctgttatgtttaataaggtcacagggatgccgtccccatgacctttgttgtcttaattgttaaatttttggataaccaaagcggcgttggtacctccaaagccaaagctattgctcatgatgctattgagtgctgtttgacgagtttgggtaacgatgtcaaaatctttggcagcgtcatctaaattttggatattaatcgtcggagcgataaattcatggttcatcataagcagacaatagatcagctcttgggtacctaccgcacccaaactatgacctgtcatggatttggttgagctgatgggtggtgtttgctttgctccaccaaagacggttgcgatggcgttaagttctgtgatatctccaaggggtgtgctggtgccgtggctattgatgtaatcaacactggctaatcctgcttgagcaagggcgatttgcatacatctgaccgcaccttcgccacttggtgcaaccatttctgcaccgtctgaagttgcaccatagcctgtaatctctgccaagattgttgccccacgggactgtgctgattcaagactttcaacaacaaccatgccaccaccgcctgcaatcacaaagccatcacgatctttatcataggggcgactggcggattgtggagtatcgctgtactgtgtactcattgcacccatggcatcaaacatacacgattgcgtccaatgctcactttcaccgccgcctgccagtacgatatcagccttaccaagttgaatcagctccatggcatgaccgacacagtggcttgaagtggcacaggcagaagatagcgagtaagacaagcccttgatttttagccccgtcgctaaggccgcggataccgagcttgccatgattttgggaactgccattgcacctacgccacgcaagcctttttcacgcatggcatccgcagctgccaccacatccgcagtagaagcaccgcccgatgctgcaaccaccgaaaccctaggattgtcagtgatggtgtcaatgctaagccctgcgtttttgattgctgataaagcactgatatatgcataaaggctggcgttgctcataaagcgctttaatttacgatcaatgcctgtggtgtccaagtcatcatgatctatactacctgccacgcatgatttaaatcccaaatcggcatattcttgcttaaagcgaatgcctgaacgcccattttctaaggcctccttgacggtatctaaatcattacccaagcaagaaacaatgcctgcacctgtgatgacaactcgtttcataatttcatcctaaaaagtttacagttgtaatcttgctattgtaacaaattattccaacacttagggaaattttcccaaaattttcataaaaataggtgaaaatgactaaagatagacaagggtttaccaaatatttagttattcatcaattggcgacggtatttatgaacatttaataacatttatgttgtatattatcactaggcgtagtttagtttttgtgataatctttagaagataatttttatgacaatttcatacaattaatgaggttggacatacgatagataaaagtaaattgactttttgtattttatgtcaaaacctgaatcttaataccaaaatcatggagtaactgatgacaaaatcaactcaaaaaaccaccaaacaaacacaacacagccatgatgatcaagtcaaagagctggctcaagaagtcgctgaatatgatgatgttgaaattgttgctgaagtagatatcgacaatcaagctgtctctgatgttttgattattcgtgatacggataccaaagctgaccaagcagatcacactgatgacgcatctaaagcagatgatgagactgtggtagatggcgttaaacaaaaagctcaagaggctaaagaagattttgaaaataaagcacaagatcttcaagataaagctactgagaagcttgaagtcgccaaagaagctacccaagacaaggtagagaaaactcaaagtttagttgaggatatcaaggataaagcccaatctttgcaagaagatgctgccgatacagttgaagcgttaaaacaagcggccagtgataaggttgagactaccaaagctgaagctcaatcactaaaagatgatgctactcaaacatttgaatcagccaaacaagcggttgaaggcaaagtagaagccatcaaagagcaagtcttagatcaggttgactccctaaaagacgataccgatcaagataatactgatcaagatcaagaaaaacagaccctaaaagataaggcggtgcaagctgccaccgctgctaaacgcaaagttgaagatgtggtagatgatgtcaaacacaccaccgaatctttcaaaaataccgcaagcgaaaaaatagatgagattaagcaagctgctgttgacaaaacagaagaggtcaaatctcagcttagccaaaaagctgatgccctaaaatcttctggcgaagaactcaagcaaacagctcaaacggctgctaatgatgccattacagaggctcaagctgccgtagtaagtggttcggttgctgccgctgattcggcacaatcaaccgctcaaagtgcaaaagataagctcaatcagctctttgaacaaggtaagtccgctttggatgaaaaagttcaagaattgggcgagtaatatggtgcaactgagaaaattaatgcagtcagcgaatatgtagatctggctacccaagtcattaaagaagaagcacaagcactacaaaccaatgcccaagaatctctacaagctgccaaagcggctggcgaagagtatgacgctacccacgaagataagggtttgaccactaaacttggtacagtgggtgcctatttgtctggcatgtatggcattagccaaaataaaaataaccattaccaaggcgttgacttgcatcgtgaaagttttgataaagatgcatttcatgcccaaagcagtttttttgcagggacaaatatttggtgccaaagcagttgcagctaagaatgtggcagctaaagttgttcctcaatctaaatttgaagccatcggtgaatcactttataataaagtagctgaatggtcgaatgcatgggcaatcaaagatcttaaaaatgacccaagatttgatttaatcaataccatgaacacccaagagcgtcatgcttttgccgaagatgtcgccaatcaaaaccgtgcgttggcaacgcttggcggtgtggcaggcttagcaggcttaaaaggtgtgcttgctgatgcagcttggctattgatggtatcgttgcgtacagtttatcaagtggctgccatttatgatcagccgctgactggcaaagaaggtactaagaaagcttatggtgtgctgtcaggtgctaatcttgaaaaactccaagaaaaacaggtgattttgacagcgttggctttgggtagtagcatgcttgctaatgctcaacaaacaggcattaaagctcagttagatagcttgtctgctcgttatcgtgaaagccaaccttatgccaaacagtttttggatttggataaatttgttaatcttgataatttaaatccaaattggttgcataaaattttgccaatatctgcagtagcagtgggtgctcattataataatgaactgattgatgaagtcattggtacagcgatggcaaccttttcagatgattttgagcaaagtcatcaattgatttctaactcaagtgaaaatacggaaaatcaagaatcaaccgccgaagcataattaaaaaatcgctatcaatcagtcattttttgatagtggcttgaattattcttatcaaaaacataatttattttatagggctgcttgaagttttcttgatttagccctataatatattgccctaaatggggatttgcgttattggttgaaagtaccaaccaagatcggtgcttgattgatgacgaatttttaacaacaacgggagaaaattgccctatggcaactacaaaccagcttatccgcaagggtcgcacaaccatcaaggaaaaatcaaaagttcctgcgttgcaagcgtgcccacagcgtcgtggtgtgtgtactcgtgtctatactaccacaccaaaaaaacctaactcagccatgcgtaaagtttgccgtgtacgcctaacttcaggttatgaagtttctagctatatcggtggtgaaggtcacaaccttcaagagcatagcgttgtattaatccgtggcggtcgtgtcaaagacttgccaggtgtgcgttaccataccgtacgcggtgcacttgactgtgcaggcgtgaaagatcgtaaacaaggccgttctaaatacggtgctaagcgtcctaaggcgtaatcatttgcctaagacattgttgcgtgaatcagggtttggtgtgtcagacccaatcatgcagtaaggctggttaaacctagctttataccagataatcctgaagagataaggaaaactattatgccaagacgtcgtgtcgtcgctgcccgtgaaattctaccagatcctaaattcggcagccaaacaattgctaaattcattaaccatgtgatggttgatggtaaaaaatcagtcgcagaaaaaattgtttatggtgcactagaagcagttgttgccaaaaagaatattcaagaccctgtggctttttttgaagaagtgctagaaaatgttcgcccaaccgttgaagttaaggctcgccgtgttggtggtgctacctatcaagtacccatggaagtacgcccatcccgtcgtaccgccttggctatgcgttggttagctgatgctgcttcaaagcgttctgaaaaatctatggctctacgcctagctggtgagctaaatgatgcttcagaaggtaaaggtgcagccattaagaagcgtgatgatgttcaccgtatggcagacgcaaacaaagcgttttcacactatcgtttctaattttaggtgcattaaccagcgtttggtgcatacttttcttacaataattgtaattgtttttggaaattcatttccaaataatactcaaaaatctgttggttgtgatggttaatagccaacagatttaccaaattaaacagaatttttctaggaaaaattatggctcgtacaacccctattagtcgctaccgtaatattggtatctcggcacacattgatgcaggtaaaaccactacctctgagcgtattttgttttatactggtgtatcacataaaattggtgaggtacatgacggtgccgctaccatggactggatggaacaagagcaagagcgtggtattaccattacttctgctgcgaccaccgcattttggtcaggcatgggtaaccagttcaaagaacatcgtatcaatgttattgacaccccaggccatgttgacttcactgtagaagttgagcgttctatgcgtgttcttgacggtgcttgcatggtttattgtgctgttggtggcgtacaaccacagtctgaaaccgtatggcgtcaggctaacaaatataaagtacctcgcttggcatttgtgaataaaatggaccgtacaggtgcaaattttttccgtgttgttgagcagatgaaaactcgcttaggtgcaagccctgtgccaatcgttattcctatcggttcagaagaaaactttactggtgtggttgacttgatcgagatgaagtctatcatctgggatgaagcgtcacaaggtatgaagtttgaatatggcgaaatcccagcagacttggttgacactgccgaagagtggcgtactaacatgatcgaagctgccgctgaggcatctgaagagctgatggataaataccttgaagaaggcgaattgtcaaaagaagatatcgttgcaggtttgcgtatccgcactttggcgagtgagattcagccgatgctatgtggttcagcgttcaagaacaaaggcgtacagcgtatgctggatgctgtcatcgagttcttaccagcacctgatgatgttgaagcgatcaaaggcattttggatgataaagccgaaaccgaagcttctcgtgaagcttctgatgaagcacctttttcagcattggcattcaaaatcatgaatgataagtatgttggcaacttgacatttgttcgtgtttattctggtgttgttaagcaaggtgatagcgtttataaccctgttaagatgaagcgtgagcgtatcggtcgtatcgtacagatgcacgccaacgaacaaaaagaagttgaagagatccgtgcaggcgacattgcagctttagtaggtatgaaagatgtaaccacgggcgacacgctgtgtgataacgataacatcatcactctagagcgtatggaattcccagagccagtaatttctttggcggttgagccaaaaacaaaagctgaccaagaaaaaatgtcagttgctttgggtcgcttagcaaaagaagatccttcattccgtgtacgcacagatgaagaatcgggtcaaacgattatttcaggtatgggcgagcttcaccttgatatcatcgttgatcgtatgaagcgtgaatttaatgttgaagctaatattggtgcgccccaggttgcttatcgtgaaacgattcgccaatctgtggaagttgaaggtaagttcgttcgtcaaacaggtggtcgtggtaaatttggtcatgtttggttgcgtcttgaaccacttgatccgacaggcgatgtggaatacgaatttaacgaagaaattgtcggcggtgtagttccaaaagaataccatgcagcagttgataaaggtatccaagagcgtatgaaaaatggcgttatcgcaggatatccagttgttggtatcaaggcaactttatatgatggttcttatcatgatgttgactctgatgagctatcatttaagatggcaggttctatggcgttcaaaaaaggctttctacaagccaatccagcgctacttgagcctatcatgaaagttgaagtggaaacacctgaagactacatgggcgacatcatgggtgacttgaaccgtcgtcgtggtatggttcaaggcatggatgatcttcctggtggcaccaagtctattcgtgcagaagtaccattggctgaaatgtttggctatgcaacccaaatgcgttcaatgtctcaaggtcgtgcaacttactcaatggaattcttgaagtatcaagaaacaccaaaaaatgttgctgatgagatcatcaagaaatttacagctaaagatgatgatgaataattaatcgtctattagcagtagtatcatcagataccatctgatactcggatggtatcatgaatcaaattttaacaatgttgcgatctgtttgtatgatcgcatatactcgaggaaaccatcatggcaaaggccaagtttgaacgtgtaaaaccacacgtaaatgttggtaccatcggtcacgttgaccatggtaaaaccactctaactgctgctatcgcaaccgttgctgctaagcaccacggtggtgaagcaaaagattacgctgctattgactcagcacctgaagaaaaagcacgcggtatcaccatcaacacctctcatattgagtatgacactgcagctcgtcactacgcacatgtagactgcccaggtcacgctgactatgttaaaaacatgatcacaggtgccgcacagatggatggtgctatcttggttgtttctgcaactgatggtcctatgccacaaactcgtgagcatatcctactatctcgtcaggttggtgtaccatacatcatggtattcatgaacaagtgcgatatggttgatgatgaagagctactagaattggttgaaatggaagttcgtgaacttctatctgactatgatttccctggtgatgataccccaatcatcaaaggttcagcactagaagcattgaatggttctgatggtaaatatggcgagcctgcagttctagaactgctagacacactagacagctatatcccagagcctgagcgtgatatcgataagtcattcttgatgccaattgaagatgtcttctcgatctcaggtcgtggtacagttgtgactggtcgtgttgaatcaggtattattaaagttggtgatgaaattgaaatcatcggtatcaaaccaactgctaaaaccacctgtactggtgttgaaatgttccgtaaactgttagacgaaggtcgtgcaggtgagaactgtggtatcttgttgcgtggtactaagcgtgaagaagttcaacgcggtcaagtacttgcaaaaccaggttcaatcaccccacatactaagtttgatgctgaagtttatgtactgtcaaaagaagaaggtggtcgtcacaccccattcttaaatggctatcgcccacagttctacttccgtaccacagatgtgactggtgccatcactctacaagaaggtaccgaaatggttatgcctggtgacaatgttgagatgagtgttgagcttatccacccaatcgccatggataaaggtctacgctttgctatccgtgaaggcggtcgtaccgtaggtgctggtgttgttgctaatgttaaagactgatatttttagtatttaacttaagcagttaccacaaaaaccaaacctgaaagggtttggttttttgttggacaaagggtgtaaaaaaatgtgctggattgaccaacacatttgtattttaacttgaaaggctagatagtaagtgaatctaaatacttttcggcatcaagtgcagccatacagccagtacctgccgaagtgatggcttgtcgataggtgtgatcagcaacatcaccagcggcaaaaacaccattgatattggttgctgttgcattgccgtttaatccgctgttgacaacgatatatccatcttgcatatttaattgaccatcaaataacttggtatttggtttatgaccaatggcaacaaacagacccataatatctaactgtttgattgagccatcttgagtggactcaatcataacccccgttacgcccatgtcatcaccaacgacttctttgatttgatgattccattcgattttaatattaccatctttaactttttcaaataactggtcttgtagtattttttcggcacgcaaagtatctcggcggtgtatcaaagtaacctcgctggcaatatttgataaatataaagcctcttcaacagcggtattaccaccaccgacaacagcgactttttgatttttataaaaaaagccatcacaagttgcacatgctgaaacaccttgacccatgaacttttgttcagattcaagccctaggtactgtgcggttgcacctgtagcaataataagggcatcgcaggtatagacacctttatcgcccactagcgtaaaagggcgattgtgtaaatcaacttgggtaatactgtcataaataagcttggtgccaaagcgttcggcatgggatttcattcgctccatcaagccgttgcccgtcagaccatgtgcatcacctggccagttatcaacttcggtggtggtggttagctgtccaccaacttgtaagcctgtaataatgacggggtttagattagctcgggcggcataaacggctgcagaatatcctgcaggacctgagccaagaatgataaggcgatggtgctgtgacatagaggcactcctaatttaagtaattgatttgtgccttagtatataagaccgattaaaataattgcaagtaaaaagcccaaatcaagctgttttgggctttttacttaaaagatagttgctttagataaagcaaacattagtctaaaaatgcaaaatgatcaatatccatctgcatcatggtttcacttggcacggtcatgctctcagcatgggctgaactgcgtggtagaattttttcaaagtagaattcagccgtttgagttttagcaatataaaattctttgggctgttctccgccgtttttgattttatcaaatgaaacggctgccatgcgtgcccaatgatatgccatcatcacatagcctgaatacatcaaaaagtcatcagaagctgccgaaacaatatcacggtctttacgagcagtcagcaacaagcgagcagtcagcatattccattcagcacacagtttggtcagtacccaaacatattttcgcatttctttgtcaagtgcatattcaccacaccatttcataatgccagcggtataatctcgtatggctttaccaccaccatgtaataataccttgcgacctaataaatcaagtgcctgtacgcctgtcgtaccttcatacagtgttgcaatgcgggcatcacgagcgatgagttccatgcctgattctttgatatagctgtgtccgccatagatttgttgaccatgcttggcagcttcaataccaagttcagttaaaaacccttttaggatgggtgtaaaaaaccccattttatcatcccactttttgatggcggtctcatcgcctttagcaaccgcttctgccaacttatctgcatatcgtgcggtatgataaatcatggagcgagcaccttcggcaaacgctttttgggtaagtagcatacggcgaacatcagcatgatgaatgatggcatcagctggttgatttggctctttgacacctgataaagcacgcattgagcgacgctctttggcatagggtagggagttttgaaatgacagctctatatgtgccagaccttggatacctgtaccaatacgagcagtattcatataagtgaacatggctttaagccctttatttgttcgccaatcaaaaatccagtcgcaccatcaaagttgataacacaagtagcagaagatgtgatacccattttgtgttcaatagacccgcaggcaacagcatttctcttatccgcttcaccgtcagcatttggtaggaatttgggtacgataaacaatgaaatacctttagtgcctgcaggtgcatcaggcagtcttgctaaaacgatatgaacaatattctcggtcaaatcatgctcgcctgcagaaatgaaaattttactgcctgtgattgcataactgccatctgcatttggtaccgcacgagttttcatctgatttaaatcagtaccacactgtgcttctgtcaaacacatggtaccagaccactcacctgagataagttttggcagataaacggatttttgttcatcatcaccatattgcaagatggtattgatagaacctgtcgttaaaccaggatacattgcccatggccagttggcagtacccatcatttctgatttaatcagatttaaagacataggtaggttcatgccaccaaatttttctgggtagctgattgcttgccagccaccttcaacaaattgctgataagcttctttaaagccagttggtgtcatcacctctccatctttaaaagtacagccttcggcatcggcaggctgatatagcggtgctaagatattttcagcaaaatctgcaaagccttctaggatcatatccaccgactcaggatctgcggcagcaccattatccagtgttttataatgtgcttgatagtcaagcatctcatttattaaaaatttaatatcacgcaaaggggctttgtaagttaacatgaaatatccttttattttcaatttatctggcgtctgagtactcaaaaaaccacttgagatgcttttactatacagagattttaatgtttattaaagggctaaaatgatatatataacttattttcataataaatagtatttattataattatttttaatgaaaatataaaaaatatgatgccaaataaaccataactgcccatagattatgcaatgggtttttggtttatctcataatttacaagccccgccttcacaaccttcatcattgatgctatcaataccaccctcaaccgctacgccatcaaagtcatcaaatagatcatctaaatcatcaaatagctcatcggcttgggtttgaagttgttcggtcatattatttctccaatcaaagtaaaattaaaacggtaaaatcaaaattgcacttgggataagtcgattgttttgcccgtccattgttcaaaagacagttttgcttgctggattagcataccaaaaccatcagagatatcagcaccttgttgtttaaaatgtgttaaaaattctgatggtttgccatacatcatgtcataggcaaaatttgctgagcagtcgcccaaatcaagtatttgtcctattgttgtggcagaagtggcattaataatcacatcaaatttaccaccagtctttagctcatcaagtgaatgagcgctgagtttatcggactgaaattcattcaccaaatttgttgctttcaaaaaagtacgattaaaaatactgatgtgtgcacccgcttctagcagcggtaaaatgacgccccgtgccgcaccacctgcaccgataagagcaatttttttattatccagctcgattgcctgtgcgtacaaatctgcaaccaacccacgaccgtcagtgttatcaccatacagaccttgttggtcttgtaaaatggtatttaccgcacctgcagcaagggcatgcgtactgaggcgtccgtttgatttaatcatctcaaatgccatttctttaaagggcagggtaatatttgctcccacaccgcccccagcaaaaaaagcagacacaacggcggtaaagctgtctgcgtcattgggacaatattgtttttgatagctcacaggcagcccgacactgcgtgcaaaggcggtatggatttgtggactttttgagtgatcgataggattaccaataacgataaaatgttgcatcatttggatttttggtcgactaaaatggttaaaggctaattttatcaaaattcgttgctaatggggtggagtctatgggcttttatgttaaaattagtaaaattttattgatggcaatatcatgacaagcgaccaatctacgaacaacgccaacatcttcttcaaaaaaattcgtaaaacttggctgatctgggcaatcatcttggcggtgtttgtgatattgtttttaacttttcgccccatgaccaaagatgacgcattggtcaaagatgatggcgaagttaaggtatatcagcctgtggtgtatgatactgccacatggcaaaaagccaccaagacaagcaatgagattgaatcactaaaagcacagcttggcagcactgcaacaacagaagaggcacttgatttttatggtaggcgtgcgatccgttatcgctttagtacgccgtatgagccaccgttttatctcattgagtcagagaatttcttggaggtggtttggtattatgccgcatccactgacgatgaggcaaccaaagcacagtctttagattttgccaagcgtgcttatcgtatgatgagcatgcttgaccaaaatacaggcacacatgtcgtgcatcaaatacttcaaggtatcgctatgggatctcagcgtgttggtatgctgaatcttgagcaggcagattgtcaagattaccgttgccaaattatcttgcataaataaatggctatggcaaagttttatcagtatttcaatcgcaccttggtggcatcagatgatcgtatggatgatcgagcatttgcttttggtgatggattttttagcaccatcggcgtacgccaaggtcagatactttttgctcaactgcatcacatcagaatcacgcatggcttaactatttttaagcttaatttggatgttgatgagatgatgacttgcttaagtaagcttgcccatcaaatgacagaaggcatcataaaaattatcatcactcgaccaagacagagcatgcgtggctatggttttttgtcagtacagcccgcccaagtgttgattaaagtgatgccattagccatttatcaaggcgtatcgtttatcaaaggtgtacctatccagccaaccataccacgccaaatggtctgcttgacacacaagctatctcatcgcccaccacacttagcaggaattaagctgattggtgcaacagaacagatttttgcacacgcagagctactttatcatcagagcatggatgatggcattttagatggtttggttggcaatgtgcatggtgaatggatttgtgcgacgatggggaatgtgttttatcgtcttgggcagaattggtacacgccgttggttgataaatcaggtgttttgggggttatgcgatgtgccgttattcaaagtgggctgcttggtgatgttaaagagcgtttatttaccaatgcagatcttgatttcgtcaatggcttaatcacaaccaacgcagttcgtggtataaccgccatgtcaatgcttaatgggcgtcaattgacgcatctttttggttaatttatccatctatcatgaagtgaatttgtgacatgtgctaaatttatggtcattggtcataaatttttgctacaataaataaaatatctatggcaatgaccgattatgacagcttccaaaaaaccacatcaaacaccaaagcataggcgttcatcaagacacctaaaaacccaagcgtcatctaattcgccttttagatctgtacttttaatgatggctttggttgctacattggtcgtgctttttgttgtgtatcagtcaatttatgcaacgactggtcattcagagcatatacttacggtggataagggcgagacttatcacagtcttttgagtaaaaaaccttggtcagatgcatttttgagttcggcgtttgtaaccaaggcatatgtggcacttgccacagataagtcgctacaagctggaaactatcaagtgccagcaggtgctagccttgctcagatgattcgtattttaaataagggtgggatggcgactgaatttagtttgcgtatcattgagggtaagacggttaaagagttgtatcatacgcttaagacgaccgatggtgtggttttgaaagttcttaccccgcctgcagatggttatagttggacagatgtagcgcgtgataataaagcggtggcacaagcacttgagattgaatcgcccaatggcaatttggagggtatgtttgcaccaaatacttaccaattttcacatggcacaactgatttagaaattttaagacgcttatatcaagatcagataaaaattttgaataaagcttgggaatctcgtgatgaaactttgccttatcagacaccatatgaagcactgattatggcaagtatcatcgaaaaagaaacgggtgttaaacaagaacgacaaatggtttcagcggtatttgtcaatcgtctgcgtcagggcatgagactgcaaacagatccgacaatcatttatggaatgtttgaccgttatgatggtaagatttatcgaagtaatattgccgaaaaaacagattataatacctatcaaattgatggtctgccaccaacgcccatcgcattaccttcggcagcttccatcaaagcagccatgcaccctgctgataccgatgtgatttattttgtggcaacaggcagtggggggcatacttttagccgcacctatcaagagcatcaaaaagctgtggcagaatatcgtgcttttatgcgtgatcgcaatcaataaaagggtaagtgcatgcaagggaaatttatcagttttgagggtactgagggcgtgggtaaaaccacggcaattgaagcactcattactcgtttggtggatcgtggcatacaagtcgtacgcacacgagagccaggtggtagtgagctggccgagcagttgcgtcaactatttttaaatccgaatgccaatatgaatgctgacacagagattttgctgatgtttgctgcacgcagtgatcatttgcatcaggtgattttacctgcaattaaatcgggtaaatgggtggtcagtgaccgcttttttgatagtacggtggcttatcagggttttggacgatatcatggaaaacaagcggcattggctaagattgagcttttgattgagcagtttgtgcccatttatccagatgtaacactttggcttgatttggatgtggtgatgggtatgcagcgtgccgccaaacgaagtgctgctgatcgattggaagccaacgacattgctttttttgagcgtgtgtatcaaggtttggcatatcagcacagccagcactccaatcgtattcatcgcattgatgccaatggcactgtggcagaagtggcggcacggatagataccgctttgggtcttgattgattgtttgatgattgattgcttaaaccagtcaagcctgcaatcggcatataaaataactgtaaaaatgtcatttaaatgtgataaactacaaaagattattctgctttttaaaatcaaaatcttggctaaagcaggttcaatcgtattcatcataaccaaaagtacttagcaaggtgtcttatgacagatgcgtatcaacaaatcaaatcaacattaaaaggtgtcatgaccgctttagtgactccaatgaagccagatggttcggtggactatgatacgcttgctcaactgatagattggcagattgatgaaggggttaatgccttggtggcggtaggtaccacaggtgaggcagcaacacttgcaattgatgagcatattgatgtcattcgcttttttgtgaagcaagttgcaggacgcattcctgtgattgcaggaacaggcgcaaactcaacgcgtgaagccattgatttaaccatggccgccaaagcagctggtgctgattttgctttactggtcgtgccttattataataaacccacccaagagggcatgtatcagcattttaaggcggttgccacagcagttgatataccacagatagtgtataatgttcctgggcgtaccgtggttgatatgtgtgaagatactgtcagtcgtctggcagatattgataacattgttgccatcaaggatgcgacaggcaatcttgaacggggcatcagtctaattcgccgagtgggtgagcgtatggtggtattatcaggcgatgatccaacagcacttgagctgataaaatatggctcaaaaggtgatatttctgttacctctaatattgcacccaaggcgatgagtcaagcgtttggattggcacttgaaggtcattttgaggaagcttaccaaattcatgatactattgttcatctacaccgtgatttattcattgagtccagcccccagcctgtcaaatatgccttacacaaaatgggcaaaattggcacaggcattcgtttacctatggtttggctggctgaacactatcacgaaaccattgataattcactcaaaaaagcagggttgatttagtttgagccaatactcgctgacatactgataaatatgggtaatgaccaaatacaagacaaaagtggaaggtttatgaaatttttaaaaataacggctggtgtgttaacggctagcatgatgttgacaggctgtacaacaaccaaaaatattctgtcaaagcgtaataatggcagtttggattatcgcaatgaaaaaaaactggcgcctattcagctgccagcacaacaaccagctgcagaatttacacctttgtatcatacaccaaattcggtgagccagttgccagattttacgaatgaatcaggcaaacagtatcaactgccaagaccaccgagcgttaggtgatatcgcttaaagctttggatgacttcctaatttatcaatcaaatgagattaccatgcaaaaacaagcactactttatactggaaaagccaaatcagtttatgaaactgaccattctgactatttgattttacattttcgtaatgatgccagtgcatttaatggcgaaaaaatggaaagtcttgaccgaaaaggtgtcgttaataatcgttttaatgcgtttatcatgcaaaaacttgcagatgcaggcattgaaacgcactttgaaaagcagctttctgatgatgaagttttggtaaaacgcctgaaaatgattcctgtggaagctgttgtgcgtaactatgctgcaggcggtttaatgaagcgtttggggttatctgaaggtttgccattattaccaccaacttatgagctattttataaggacgatacacttggtgatccgatgttgagtgagtcaaccgccattgctctgggttatgccactgctgatgagcttgcccaaatgcaaagcctgactttgaaagtcaatgaagtattatcaaaactgtttgatgatgcaggcttgatgttggtggattttaaattggagtttgggttattccaaggtcgtgtggtacttggtgatgaattttcgccagatggctgccgcttgtgggataagcaaaccaagaaaaaacttgataaagatcgcttccgtcaaggtttgggcgatgtggttgagggctatgaagaagttgctcgccgcattggtgtacctttgtaattatttacagattttgaagataaagccatatactttcagatgtataaaattgttacctatatccctgagcctgatttagaaacggtaaaaactgcgatgtttgaagctggtgcaggtcattttggtccatatgagcgttgcagctggcagaccttgggcatcggtcagttttgccccttggaaggtgccaatccaacaattggtaaaatcgggcaggttagtcaggtttctgaatggaaagtggaaatgatcgtgcctgaaaataagctgtatgaagttgttgaagcttataagcatgcacatccttatgaagtacccgcttatgaagtctatcaaacggtagatgttgatagcgattaagcctgccaaattaaattaattagccaatcctttcataagcctttggaaatattcaaaggcttattgctatgatacggtttactcatctcatttcggctgatagcatatcttaaaaatgagcaaacaatcggattgaaagcatataacaacaagccaaagcgatgaagtggtaaaatagcaacttcataataatccaaaaaatgatcaaatcatgacatagattttattattttaattaaatgaaaaataaaaaataataaactttatcataacagcatgaatgaattttaggtgttttgggtcggtcttttatgctatgatagaccaatttttatgaaaattttggaagtgtcatgtcaactttgctgagtcatcacgagtatcttcgcctcaaaagtcagggctttagccatgtacccttaatcaaaaaacgccttatggatgatgccacgcctgtgtcggtttttgccaatatcagacaactcaatcccaaggcatatctgtttgaatcagtggttggcggtgagcgttttgcacgctactcgatgattggtctgggcaagggcgtatattttgaataccaagatggcgttatgcgtgtggggtcagagcttgtcggtacagtatcaagtaccaagaccgatcagccatttgatgaaattcgacgctttatgggacaatttaacatacccaccaaagacgatgtgccaaatttaccagtttttagcggtggtttggtggggtattttggctatgatttgatacgcacaattgaaccgacagttgggcattctgatacgcccaatcctttgaatttgcctgatttgtggctaatgctttctacagaagtggtgatatttgataatcttgagcatacgctgtctattgtggtttatgccaattgtgatgttgaaaatggctatgaagatgcacttggtcgcttaacgaatattgaaaatatcctaaatcaaaagccagatttgaccaccaaagcgcatccgataccaaaatttgtatcagccacaggccagcaaaagttttgtgatgatgtccaaaaaattaaagagtatattttggcaggtgatgtcatgcaagtcgtgcccgcccaaagattatcagccaagtctgaagcagatgcactgagtgtgtatcgagcactgcgttatttaaatccatcgccgtatctatttatgttgcatggtgaaacttttggtacgaccaaatcaccgtttgatattattggtgcttcccctgagattttatcccgcatcgaaaatggtacagtaacggtcagaccattggcgggaacacgccgccgtggcagtgatatggatgaggatctggcgcttgagcatgagttgttaaatgaccaaaaagagatcgcagaacatctgatgctcattgatcttgggcgtaatgatattgggcgtgtctgtgagattggttcggttaaagtgacagatcagatgttcattgaacgctactcgcaagtgatgcatatcgctagtaatgttgaggggcgtatacgccaagatgtcgatgctttagatgtgttttgtgcgacctttccagcgggtactttgtctggtgcgccaaaaatccgtgccatgcaaattattgatgaagttgagccagtgcgtcgcaccgtttttggcggggcgatcggatatcttggctggcatggcaatatggatactgccatcgcaatacgcacagcggtcatgaaagatggtcaaatccatgtacaagctggtgcgggcgtggtggcagattcagaccctttggctgaatgggatgaaaccaacaaaaaagctttagcccttgtcaaagcagtagagatggcgtgcagagggcttgagatttagagtctagcataatttctataaatttagggtcggttaattccgaccctaaattttaaatttcaatatgtacagtttctataggctctaaaaagttgcctgattgcgttgaccgccataactgacctggtaattgctcaataatttgatcatcttctaccagtttcacaatggcttgacttagtatttcttgatcgtattttatggatttttcatctaaaaaattggtaatatctgtcaggtcgcccatctctttaatggtgaagtacttggcaactgcccgatgaactttcttttcgttagtgtgactcaaatagcctaaacaaaatagcgtcaaaataaatataatccatatgggtatatcaagtccgataatgctaaatccgtactttattaaccaagagattccaaaaagaacggcaataccgataataataagccagatttttttgaaaagtccccaaatgaattttagtattgccaatatagcaccaagaacaaacaatccgacaacaataaaaatgataatttccatcaccgatccaaaggtttgtcgatatcaaattttaaagattgatgctctaataatgatgcttgagcttgggggtttagatattcatcgacattaaaagttttggattgcttttttttattaatccatgaaccttgcgtattttgaaaataaaaatcaaaatcaatttgcatggtaccggattccaaaagatttaagatggcataacctgcaacaaagtttagaccttcatcacgctcagtttgcaagatgaaatcatccgcacctttggaaaaggatgaaacaaattcagcggccgaagtttgattatgtttaatcaatttcggtaatatatttctagaaatgatttctttggcagcttgctctaaatcttttaagttatcatagatttttgttgaatcattattcattttacacctccaaatgtaattctgcttgtacttcatctgtaatatcaacaggtcctctgttattctcaaccttcctgcgaatatcttctgggatttcatttgctggcacattgcgcgtcatgatggtttcctgccattgtcctcgttcattttttgaaaaaaacttctgtagagcttttgcggtggcatataaggcattacccgtttgaagataagttttaaaaccaacaatcatactgggtattaggtgggtttttatgcgctcaatactggcctggataaaagatttgatctctttccagaaagctgtagcaacgaataccccagcgataagcgcaccagcgagtaaaaaaggaatcatatggtttctccatcatttaattgtgatttaacatactcttcagaaacaactcttgtttggaacttggtttcttttcgagaattttctctcttacttctttgaatagcctcaatcttgttttgtagattctcatgagtgaccaaatcgcaaccttctgtcttggctgaaaaagcagctaataaaatcgcatttgaaatatccgaaccgcttaagccttctgacagtttgacaatggtaggtaaatcaatagaatgaggtaatttatttggtatgtatttattaaataggtaggttctagtttcttcatcaggaagtgtgtattcaatgtgtattaaaatgcgccgcataaaggcaggatcatagttgctaataaaattagtggcaaaaatgaccgtatcattataatcattaagcaaagttagcatcactgaacgtgtttgattcacactggtatcggttgcacttgtcatattagtaacacgacggcttaaaattgcatcagcctcatcaaagaataagattgcatcattttctttggcgaattcaaaagccgcttgtatattcttaggtgtttctccaacatattttgattcaatgtcaccatagttgattaagattaattttttacctagtgcatgggcgatcgcatgggcggacatagtcttgcctgtgccaggttcaccgtataaattaatgatcatcttattatcaaacttatgggtttcagaaaacccccaatgctcaaaaacttccgattgatactgacgcagtcctatggtacgctctagatcggcttttgttttgattggcaagaccaaatcatccattttatagagagcatcacttagttcaaacgcaatcttggctgatgacttaggtctattttggaatctgttcagatccgtggtctgattcgtattgattggcatgtttaacactccgttaaataattcaagtattttttgagttgatggtttaaataatcccgccattcagcaggctcgatgatggttaaatgtggtatccatgagcgaatcattggaaaaatctgctgcttttgatagacactgcattggattaacagcccgccatcctccaaactcttgataattttttgattaggcaagatttgtttttgtaaaaaatatccccgtgcatattcatctgttttgatgagtacattggtaagctgatgaccgaaccaaattccttgaccttgatcaatcaattgccagatctcatcatcaggcacaaaagactgtccttgcaagacacttaagttaagaattttactgagcctaaaagttttgatttcattattttgagtgctgatcaaataccaacaaccccgatgattgagaagcttataaggatgaacaagccgagtttggttcttataatccaagcgaatgatctgttgttcggcaatggcacttttgatcagggggatgatgtcaaaaaatggctcaatattttcatactcatagccgacgatctgcagctggcgagtattttgcttaagcatatcacgcaaaaactggatatccatatttggaatcaaccgatgcacgccaattaagcgaatcaactcaccaaattctttttcactaagattaaattgtttggacttatccagataaaccattttgggcttacgaaccaatggtaaatagcgctccatacgcaataaatcacgccgaatggttttatcagacacctgatactctgctgccagctcatgtgtatccaatttttcatggctgctcaaacgcataaaaatatcagcaaatctatctgcaagtctttcgtgtttgttatccattgtaaatttcctgtaagaaaaatttgcag

SEQ ID NO: 29 - DNA, 66986 bp, Moraxella catarrhalis
aaaaataatgaaatttaattgtttaaaaaccaatcacacttaggattatcacccaaaaaccataatacatcattgtattatggtttttttattgcttgatttatggatatgaacttaagacatgagcctaactggttggtattgatttatttatttacattagctcacaatattgatggaaagtattaacatgtgtttaaaatatatgttatactaagcctgttaatcaatcatcgctgactttaattgtgcctttttatcattttgatgataactgttgagccagtcaatggataacagcaagtataaaccagccattattcaagcgaatgatatatgtttcatccacctaatgacactatgaggagtatggcaatgggtgaatataaaaaacattggtgggggcttgtcattacactgattatcgccttcatcttattaggttggggcggttttgagatttaccgtaccaccccgcccattcctgataagttcgttgactcatcaggtcaaactttaatcacaaaacaagacattttagacggtcaatctgcttggcaatcaacaggtggtatgcagttgggttcagtctatggccacggtgcgtatcaagcccctgactggacagccgattggttgcatcgtgagctggtcgcatggcttaacatcaaagcccaagccgatcatggcaaggcgtttgatgagctgaccagcattgaaaaaatgggcttacaacaacagctcaaagaagagtaccgtggcagtagcatggggtcggacaacacagtgatgttatccgacactcgcatagcagcgattaaccaagttgcaccttattacattgatttatatggcgatactccagagcttgccagctctcgtgaaagttttgccatgaaaaataacacattgcctgatttgacggctcgtcaaaatctggctcatttttatttttggacagcgtggacatcgtccgccaaccgcccaggaacggttgccacttataccaacaactggccgcatgaacctttaattgataatgtgcctaccgctgaaaatgtgatgtggtccattgccagtgtggtgttcttattggcaggcattggtcttttgatttggggttgggcattcttgcacaaacaagaagaagatgacattaaagtaaccgtaccaaaacaagacccattaagcttaattgagctgacaccctcacaaaaagccttagccaaatacgcctttttggtggtggcgttgtttgtggtgcagatattcttagggggctttgtggctcactataccattgaaggtcaagacttttatggtattcctgtgtctgattttatcccttattctttggctcgtacttggcacattcaatctgccttgttctggattgccaccgcctttttggcaatcggtttgtttgttacgcccatcattcatggcggtaaagaccccaaatatcaaaagcttggggtggatttgttatgggtggcattaatcattgtggtggttggctcatacattggtcaataccttgccatcgctcacatcatgcctgctcatcttaacttttggtttggtcatcaaggctatgaatttattgatttagggcgtttttggcaaatcctaaaatgggttggggtgttgttctggctggtcttgatgttgcgtggtgtactggctggctttaaaggtgaaggcgataagaacctgttgttcatctttgttgcttctgtggtttgtgtgggcttattttatggctcaggcttattctacggcgaacataccccgattgccatcatggaatactggcgttggtgggtggtgcatttatgggtagaagggttctttgaagtctttgccaccgtgtccattgcctttattttttataacttaggtttggtgagcaaaaaaatcgccacaggctcttcaattgcgtcagctgccttgtttttattgggcggtgtgccggggacattccaccacttatatttcacaggcacaaccacgccaatcatggcaatcggtgcgtcatttagtgctttggaagtggtgcctttgattgtcttgggttatgaaggttatgaacactggtcaatgcaacgccatgccaaatggatggagcgtttaaaatggcccgtgctgtgctttgttgccgtggcattttggaacatgttaggtgcaggtgtgtttggctttatgattaacccacccatctcactgttttatctgcaaggtctgaacaccacgcctgtccacgctcacgcagctttatttggcgtgtatggcttcttggcattgggctttgtgctgttgattgtgcgttatttgcgtcctgaatatcgcttcagtgataaattgatgaaaactggcttttggggattaaaccttggtctgttactgatgatttttaccagcttgttgccaattggtatctatcaagcctatgcgtctatcaccgaaggcttgtggtatgctagaagtgaaggcttcttacaacaagactttttagaaacattgcgttgggtgcgtacctttggtgatgtggtctttatcatcggtggcgtgagcatcgctttacaggtggtcaaactggtatttggtcaatcgccaaaacacccaaaacatgacacgcccatcacagactaaccctcgtgtgatgtccaaagtattcgttcttatcaacaaaaatccctcaaatcattgggggttttttatggtttttttatggttaatagcggttagttaatgatggtttgaataaatccagccatcattgaccgcaaatgagtcaatcacaaatgaccaaatcacaaatgttaagctacccatcatataaagacaaacagtgccttagctcatcggcgttgctgatgatgtccgccagcgtatagctgtccaaaacctgcaaaaatgccttggtggcttcggcaaaaacttgctttaaatgacaagcaggtgagatgacacaagacatggcgggttgccccacagacaaatccaaagttttgattttcctcaaatcatttgtcatcaaattatctgtcattaaatcatcttgtgctggctcatcagcaaaacacgccaccacaaaaaaatctggctctgtttggcgaacgatgttgccaacattgatgtttttggggtgcattgctaagcgaatgccaccgtttttaccccgcgcactgtcaacgactttaagcttgctcaactgatgaataaccttggtcaaatgatttttagaaatcccatagcttttggcaatgtcatcaatgcgtaccaattcatcattattgggtatggtcgccaaataaatcagcacacgcaacgcaaaatcactgtattgagttaatctcataatcacactctgcaaccatgttcatcttgacacgccatcggtcaatctaaaacactcaatctcaatccattcaaacgaaatccatacaaattcaagcaaaaaagctagaaattttagcaattttaaattaaaaatgacaatcattattatctttaatcatgtttaatttacatgataaaacattgatgtaaaaagattgaaaaattggtttacttttaagaaaaatgtatttaaaatacatgttaaggatatggcattatacatgtgtttgacatgtattttaagtgccttttctaggtattttaacttttttgtgctttttatttttattgatggcattgaagaaaattacaggcaacctttctataaggagaacccatatgtctaagcctactttgataaaaacaaccttaatttgtgccttaagtgcattgatgctcagtggttgtagcaatcaagcggacaaagccgcccagccaaaaagcagcacggtagacgctgccgccaagacagcaaatgcagataatgctgcctcacaagaacatcaaggcgagctgcctgtcattgatgccattgttacgcatgcaccagaagttccaccacctgttgaccgtgaccaccccgccaaagtggtggtaaaaatggaaaccgttgaaaaagtcatgcgtctggcagatggcgtggaatatcagttttggacatttggcggtcaagttccagggcagatgattcgtgtgcgtgaaggcgacaccatcgaagtgcagttctcaaaccacccagattcaaaaatgccccataatgttgactttcacgctgccacagggcctggcggcggggcagaagcgtcatttaccgcaccgggtcatacatcaacctttagttttaaagccttacagcctggtttgtatgtctatcactgtgcggttgcccctgttggcatgcacattgctaatggcatgtatggtttgattttggttgaaccaaaagagggcttgccaaaagtagataaagaatactatgtcatgcaaggcgacttttataccaaaggcaaatatggcgaacaaggtctacagccctttgatatggaaaaagccattcgagaagatgctgaatatgttgtctttaatggttcggtgggggcgttgactggtgaaaatgctctaaaagccaaggttggcgaaactgttcgcttatttgtgggtaacggcggcccgaatttgacatcatcattccatgtcattggtgagatttttgataaggttcactttgagggtggtaagggtgaaaaccacaatatccaaaccacgctaatcccagcaggtggcgctgccatcactgaatttaaggtggatgtgccgggtgattatgtcttggttgaccatgccatcttccgtgcctttaacaaaggggcattgggcatacttaaggtggaaggtgaagaaaatcatgagatttattcacacaaacaaacagacgctgtctatctgccagagggtgccccacaagcaattgatacccaagaagcacccaaaacacctgcacctgccaacttacaagagcagattaaagcaggtaaggcaacctatgactctaactgtgctgcttgtcaccaacctgatggtaaaggcgtgccaaacgctttcccaccgcttgccaactctgactatctgaacgccgaccacgctcgtgccgccagcatcgtggcaaatggattgtctggtaagattaccgtcaatggcaaccaatatgaaagcgtcatgcctgcgattgctctgagcgaccaacagattgccaatgtcatcacctacacgcttaacagctttggtaacaaaggcggtcaactcagtgcagacgatgtggcaaaagccaaaaaaaccaagccaaactgatcttaaagtttaattaagatatccgctggttttcattgagcatcatggctgtcttatgtggcaagccatgatgtgcttaatggctttcatgcgttttatgcccaatgatgcccaaagtgtgtgtttaaaagccatgccaaaaggtgtatgctaaaaagcacaaaaacttgaaagcacaaaagcttgacgccaaattaagtgaaagcttaataaagtgaaaagattattaaagcgaaattgttaaagtaatgttaaaaggtcgttaaaaaattttgaataaggagaaagtctgatgagattaactcacaccaacacattgactcacttaactgcgtgggataatgtcatcagctctttggttgtggctttggcagcgtttgtcttatcaccccagcccattgcccacgccaaaactgacaccaatgccatggcaagcatcaaaggtggcacatatcgccctttatacttaagtgaagacagccccatggtgaccgtgggtaattttcacattgataaaacacccataactaaccaacaatttgccaaatttgtcgcaaataatcccaaatggcaaaaacaaaacatcgccaagctttttgctgaacctgactatttggctcactggcaaaaaacaagcaaaggctattatccaaactcagccgatattgataaacctgtggtgaatgtctcatggtatgccgccaacgcttattgtaaagcgcaaggcaaacgcttacctaagattgcagaatgggaatatgtcgcacaagcgtcaaccactcgcatcaatggcagccaagaaaaagggtataaccaaaccattttagactggtataccaaatctgccaccatgccattaaagcgtgtggcccaaagcccagccaactactggggtgtgtatgacatgcacggcttgatttgggaatggacacaagactttaacagcaatctggtgtcaggtgaatcacgagcagacagcacattaaaccaaaccatgttttgtggttctggtgcagcaggtgcacccgacccatcagattatgccgcttttatgcgttacggctttcgatcaagcttacaatctcaatttgccctaaaaagcttgggatttcgctgtgcaaaagattaaaaatcagccacgcttagacaaacgaccagcaaaattgcacaaaatgaaccaattggttacaatcaattaaccagtgagttaacaataaccacttagcatctgtggcaaaaaacgccacatcaatcaggagcaaattatgaaaaaactcatcttagccagcagcattgccctacttttgagtgcctgccaacaaaccgaacaaaaagccgaccaaaccacccatgatggcgaggtggtctccacagaacacgcccatgaacacgctgcccatggcgacgcacacggacatgatgggcatggtcatcatgagcatgttgagttgcctgtggcggacacgccagcacctgccttagaagagtcagtatatctggtggaaggcgattggaaagaccaagatggcaacgcctttgacttaaacagtttggcagggcaaaaacaagtggttgcctttatctttaccaattgtaaagaagtctgcccatttatgatgcgtagcatgaaaaacattcaagacaaactgcctgaagaggtgcgtgccaacacaggatttttggtggtgagctttgaccctgagcgagacaccccagccgttttgaagaactttggtgagcattacaaggctgatgaacattggactttcttaaatggcagtgatgatgatgtgcgtacgcttgccaacaccatgaatatccgctatcaacacgctgaaggtggtatgattaatcattctaacgccatcatggtattagatgagcatggcaaaatgattgagcaagccaatggcacaagcaccgcaggtgaagatgctgttgtggctgcgttaaaacaataagcgtaggcaatatcaaacgataaacccaatgaatacaataaccagtgtcaccgctggttatttttttgataaatgattgagacatgtttttaatcatttgccacaaaatggcaatttggtatgatggttttatcttaataaatcagccattttgatactgataaaaaacaaggtcatgaaatggttaagatcatgatatgaataatccaaattgcttgtttacatttttgggtgaattatttacaatgagtcccttatcatcttagcaaattaaagaaagttgtgcttcttatgaccaccacgatacctactttagatcagcctttgatcacgcttaatgaacaagattttttggcatttgcagacaatgcaattgcagtgattgagactgcaaccgatgaacgcacacttcaagaattgcgtgtcagcttgagcggcaaaaaatcagccttgacagcattgtccaagcaaatgggtgcacttgatgctgacaccaaaaaacaatatggcgtgtatttgcatgagttacgcacgcatatcaaccaagccttagaaactaaggcaaaacagcttgctaccgctgcgatgaatgccaagcttgccagtgagcaaattgatattggtctacctgcgcgtggtattttatcaggtggattgcatccgattacccaaacaaccgaacgcatgaagcagttttttgttcaagctggttttagcgtggcgacaggccctgagattgagagcgattattataattttgaagcgctcaatatctcaagccatcatcctgcacgtgcgatgcatgatacattttattttgatgcacattatttgctgcgtacacacacttcaagtgtgcagattcgcacgatggaaaacagtgagccgccgattcgcattatctgcccaggccgtgtgtatcgctgcgactcagaccaaacgcattcaccgatgtttcatcaaatggaaggtttgatgatctcaaaatcaagcaattttgcagagcttaaggggttgattcatgagtttttggatgcattttttggcaaaaaaatgacggctcgttttcgtccatcatttttcccattcaccgaaccatccgctgaggtggatattttgtccgacaatgggaaatggttagaggttttgggctgtggtatggtacatccacaagtgctcaaaaactgcggtatcaatcctgatgagtatactggttttgcttttggcatgggcattgaacgctttgcgatgctgtattatggtattgatgatttacgcctatttttccaaaatgatttgcgttttttaaagcagtttagttaatatcaattaacttatttatttaattttgatgaatttaatacagagatagcaaatgaaaatcagtgaaaattggctaagacagtgggcaaatccaagcattaatagtgagctacttggcgagcagttgaccatggcggggcttgagctggacggtgttgagactgttgcaccaccatttaatggtgtggtcatcggtgtggtcactgaatgtcagcagcacccagatgctgatcgcttgcgtgttactaaggttgatattggcagtggtgagcatttacaaatcgtctgcggtgcacccaatgtatgtgttgggctaaaagttgctgtggcaaccattggtgcggtgctgcccagtgatgataataagggttttaaaatcaaaaaaggtaagcttagaggtgttgaatcacaaggaatgctttgtggtgcttcagagctgggccttgaagatgagattgatggtttgatggagcttccaaaggatgccccaattggcatggatgtgcgtgattatttaaacttagatgcgaagatttttgaaattgctattacgcccaaccgtggggattgcttaagtgtattgggcttggcacgtgagattgctgccattaatcagatgccgctcaatcgtcctgtaatccaacctactaaggtggtcactgataccgctccgagtgtgcaagttttggatgccaaagcttgtcccagatatttagcacagcgtattgatgatattgatcgcacttggccaactccccaatggatgaccgacgctttgattgcttctggcgttcgaagccataattttttggtggatgtgaccaattttgtattacttgaattaggtcagccgctacatgcgtttgatgctgataaaattcaaggcgatatcatcgtgcgtatggcacactctggcgagacgcttgaattattaaacgaacaaatcattacactcagcggagatgagctggtgattgctgatgatgctggcgtcttggcattggcaggcattatgggcggtgcacgctcagcggtcagtgatgagacaaccagcatcatactagaaagtgcacattttgatcggttgaccatctcagggcgtgcacgccgttttggactgcatacggatgcttctcagagatttgagcgtggtgtggattttgcgttgccaaagcttgccattgatcgtgctgttggtttgattgtttcggttgcaggtggtaaggttagtcaaatgacgactgccgagaatttagatgcattgcctgtcagacataagattattgtacctgtgggtaaggtatcacagcttttgggtgtagatataccatctgatcagatggtagatatgcttaatcgtcttgagattgtaaccaccatgcagcaagacagtttggtatgccaagtgcccagccaccgatttgatttaacaatttatcaagatatcgttgaagagattgctcgcatgtatggctatgccaatatttgtgcgaccttgccagagctttctgtggatatgcgatatgatgatacggcagatttggttcaattggttaagcgatctttggcaagctcaggttattacgaagcagtgagcttcagctttagcgatgctaaaattgaagcactgtttgatgatcaaagcctaggcacggtattgccacttgccaatcccatctccagtgatcttgcggtgatgcgtcgtaccttaatgtcgagtctgttaccgattgttagttataatcttaatcgtcagcagccgcgtgtccgcttgtttgaaactggattaagcttcgttggcggtgatgttgagcatgtggttcagacaccaagcttggctatgattgcaacaggcgagctgaccactgagcaaagtcatgggacacgcaagatggatttttatgatctcaagcgtgatattgaaagcctgctgccaaatactttggataaatccaaagtgacttatgaacgcacgactttgactttcttgcatccaggccaaagtgctcatctgatgattgatggcgaagatttgggcttctttggtcagctacatccaagcatttgcaaagctttggacttaccaacggtttgggtggctcaaatggatttggataagctgattacacttaaccgaaaatcaagccccatcatagcaccaagtaaattcccatcagttcgtcgagatttggcagtgttggtggatcaagatgtcgcttggcaagcgcttgaaaaagacattcgcaaggcagcgggcaaatatttgcaagatgtttggctgtttgatatctatgtgggtgaaacattgcccaaaggcaaaaaatcgcttgcttttgcgatggtttttcaggatcaaaatgccacacttgaggacgagcaaatcaaagcagcggttgataaagtcattcaaaatttggcagataaacacgctgcccatctgcgagactgacctaaaaccgccataatgccaacttatggcggttttgaattttaatacaaattaatttgcattaagggtatttttaaagggaaaattatccatccgctataaaaagcctgattatttttggaacctattgataaacaaggataaatcatgggtgcactgacaaaggcggatatggttgatgaattgaccattcgactgcgattgacacgccaacaggcaagaaaattggtcgatggattttttgaagaaatcagtcagagtcttgcccaaggtcatgaggttaaattgtcaggttttggcaattttgaattaaaagataaaaaaccccgcccagggcgtaatccaaaaacaggcgaaagcgttcccattcaggcgcaccgtgttgtcacatttaaggcaggtcagaagttacgaggctggatagatagccaaaatgaaggctgagcgggctggatatttttcatcaatccaacttgcaagcctaatggctttttgttagaatatctgctttattttcccacttaagttggctaataacatagaaaagcatggtgcgtaatgccaaagttggttggtgatgacgtggctatgctccatcgtatgagtatcatcagcgatgcttattggtgcttaggtttattggatagagagttatcatgcgtaaagacattcacccagaataccgtgaagtattgttccacgatactaatgctgatgtgtactttttgactcgttcaacggtttcaaccaaaacaactcgtgaatacgaaggtcaagaatacccatatttcccattggatatttctagtgcttctcacccattttatacaggcgagcagcgtaaaacagccaacgaaggtcgtgtggcaagctttaacaagcgctttggtgcatttgcaagccgtagcaaaaaataagcctttatcagctatttttaaaatcgctcttattgagcgatttttttagttccaaactaagatggtgctgtcgattgggctgatatgtgatttaatgaacgcatactcaggtacgcacacattaaattgtaacaaatttctagcttgttcatgtaaaagatgacaaaatcgtcttagtctgataaactaatataaaatacctaaattgtgcctattttatggcaatttagggatatttttgtcatgtttgaataattttacgatttttagataattttgcccatcaattggaatgagatggctgggaaataatttggggtagctatgcagtggagtggtctttggttaattttagcgttgatggttgtgattttgggcgtattttttgtgatacgtagtttgcgtcgtaataatttggtactagaatcggaagccttgggcgtaaaaaccaaatatggattaccaattattccaagagatgaaagggaattgccgtctagaattgagagttcaaataaaaaagtagagcctgaagatgcattatccagtatggctgctgctgtggtggctgcacctgtgatgtcacaaacctcgcaagcacaaatggtttatgagcctttaacagagaataataaagaaaatcaggcagatacgcaggcaaaaattgatgagaattcaaaaaatcaagacagtgttcgcgtcaataatccaagtggcggtctgtcgcacgctcaagattggcaagcacatgatgatgaaaatcaggacgctgattatgtggtagatatgacctttgacaaacgctcggctgtactcgatgagcatttggatgaacgccgaatttttgaccaaaataacgaccctttgcttaatgcaacagaaacggtgagcattgccattatgccacgcaactcgtttgctgggttgccaggttgcaccgtacttgaaattgtgcgtacatatggtatgaaatatggcgttatgaatctgtttcatcgctatgaaaatgaagatggtacgggtgatttgtggtttagtatgatgggcgttgggtatgagggagtgtgtgcatttgacttaaacagtttgcctgaatctcattttatggggctgactttatttttggcattaccgcatccacatgcgttaagaggatttgacagtatggtctcggtggcacatatgattgctcaggacttgtcggcagatatgcttgatgagcaaggcaatttgtttgatgatacttattttgctaagcttcgttcggtcgttgctgagcataacgccaattgatgacttctccaaaaaacagcccaatcgtgggctatttttttggcaaattaattttgactgcttgggttattgtgatcatgataaggttggcagtttggacaatagacgcttgcccgaccactgattttgatattttcaagtaaactaccgcaagtggcacacgattccccttgcctgccatagacgagcaaggtttgctgaaaataacccgtcttaccactgccaactgtaaaatcccgaagggttgaaccaccttgggtaatggcacgagctaatatttgtttgatgtgatgagttaatcgtaccagcttatcttcatgaaccaaataggcaggcgtgagcggatgaatgcctgacaaaaacaaactttcagctgcataaatattgcccacaccaaccacgacggactgatccataatcagtgatttgatgggtttatttaaaggtttttgatgagatttgggacgcatgatgtatctgatgagatagttagcatcaaaatcatcgctcaaaggctcgggccctaagtgtgccaaaaatcgtgcgtaggtgtttggctggtcgatataatcatcattgacgacccaaagaatcatgccaaagcgtctaggatcatgataatgtagagtaatgattttaccatgagaatcggcaaagtcaatcaagacatgatcgtgcttgcggggtggttcattgatatgctgttgtaagctgcccgacatgcctaaatgaatcagtaaagttttttggcgactgtcatgtgcgtgataaaaatccagtagtaaatatttagcacgccgctgtagtttggttaggacaaagccaaccaaactatccaaatctttggcaatatcatagcgtaagcgtggatgcctgacttgaacgcatgtgacagtttgaccaatcaatggctctaggcttaattttgttgtctcaacttcgggtaattctggcatgataattggctaactttagtcggctgattctaagcggttgcacggcgagcatgtagcacactaggctgctgttcaattttattgagtaggcgtgataaatgtgcaatgcctgccacctcaacataaaacttcatatgactgattgcaccatcattaaagacagtttcagcgcggtgaatattgactttttctcgatcaatcacatgcaccaaatcacgcagcagtccgttggtatttttggcttcaacatggatgaccacaggctgatagcgtccaaagctttcttgccagtgtgcgatcacagagcgatctggttcacgctcaattaagcgtaaatactcagggcaaccatcattgtggatgctgaccccgcttgataaggtgataaatccagcaatcggttcgccatgcacggggttgcaacatcttgccaaatgtatctcaacattatcaaggtcttcaagctcaattttgtatttattggggcgaattggctgtttgatttcaattttggctttatcaggcacttgggtggttaaattaagcttttgggcgaccaaattactgatctgtgtgacggtaatatcgccaatgaccaacgccacatacagatcgtcttcatgtttgacattcagatcggtaaagtattctgataggctgatttgattgggtgaaattgacagacgatcaaactctttaagtaataacgccttacctgtttcaatatttttgtcccgatcttgtttattgaaccattgacgcagtttggattttgcccgtgcggtatggatatagccaagtgacgccatcaaccaatcacgatttggttcacgattggatctggtgataatttcaatttggtcacccgtttttggctgatgagtcagcggtacatagcgaccatttacccgtgcaccttgagcacggttacccacttcagtatgcacataatacgcaaagtcaagtaccgttgcaccttttggcagttcagtgatatcgccatcacggctaaatacataaatccgctcagcattatcaatatcaagctcgatatcttcttcgccatctgctttttcattgcctaaaagctgacgcagtgagctgattttttgggtaagatagtcgtcctttttggccttgagtccttctttgtaattgacatgcgatgccttgccaagctctgcttcaaaatgcatatcaaaggtacgaatctgaacctcaagtgtacgctgctcagcgatgactgcggtatgtagtgatttatacccattgggcttaggattggtgatgtagtcatcaaattgctcaggaatatgccgccataaaccatgcacaatgcccagtgtatagtagcattcggcattggtattgaccatcacacgcaaagcacgaatgtcataaagctgatcaaaagaaagattctttgacttcatcttacgccaaattgaataaatatgcttgacacgccctgacacttcgccttggatacctgcacgctcaagctcttcgctaagcttggatttaaccagctgaatataagcttctcgttcgctgcgtttttcggcaagcagacttgcgatttttttatattcatcaggtgcaagatagcgaaatgccaagtcctcaagctcccatttaagctgagcgatggagagtcgatgtgcaagcggtgcataaatggtcatcacctctcttgcgacccttttttggcggtcaggaggtgcaaaggacagttcacgcattgcaaaggtgcgttcagccaatttgattagcacagcacgcacatcattggttgtgctgatgagcatgctataaatattagaaagctgctctctttgattggactcaaaataatcttcaagtcgttgattgctctcaatgctttcagataatctgcccatcgctaaagcatccatcaccaaatgggcaatatcctccccaaaatttacccgaatcgtctgaatgctgaccagttcacggcgtgctgtacgataaagcatggcggcagctaaggcattttcattttgaaaaagatacgccaaaatatccgccatgccaatgcctgtgatataagcacctgagcgggtgacatggggcttattggcatggatttgtacaaattggcaggcttggcgtaagatgggtaaatcttctttaccaatacgagcggcaacatgacaaatccaagtctcaatatcgatatccgatacattgatatcgcaagggttggtcgtgctactactgtgatcaactgcactgatgagtttgtgattggcaagctgtgccttaaaatctggatgcagttgcttggcaaccaaactggctgccaaagttgcactatccatgctgctactattaccgcccaataagggcaggctatctcgtatctgaaccacggtaaatccttgtaaatctaaaaaacaaatagtttcaatgatttctaggttgtattattataactcgttaagttaatgcatttgggctattatcgcaccttgccatcaaattttaaaggacaaaagcataattttcaaacaaatcgttatgccaaaaaagacaatcatcatctaaagacacttaatatcatacaaaatcccagcgacacagtatcaactcagctgaccgtacccatcttggcgtgtctatacggctgtatatcataaaccaaatctgttgaattttgatgaaataaaacaagcatttgcccaaaaggtatgctataattattttttgtgaattgttcacactcgctatttgatgacatcgcaccgatattgatacggaattttccgagcgttctagatttttatcagttcaatacaatcagcttttgattgattatcttaatttactgtcgcgatgattttggcttgtaagacttgggggataatccctttttgataagtattagtcaagcaacagcgacaaacctgccaccacattcaaaatgccattgataagatcccaaggcttaagcccatcggcttggcgactttggcggtctgtgtttttttattaaataaatacatttgcattggctcatcagcggggcatatcagttgagataattatgaccgaatcaaccacccaaaccactgacagcaccaccgaaaattttgtaccacagtttagtgacttgggacttaataagcccatcttaaaagcactgacaaaaagtggttataccacacccacgccaatccaagcaaaagccattccgcacgctctaaatggtcgtgatttgcttttgtcagcccaaactggctctggcaagacggcagcatttgttttacctgtcttggataaaatgagccgtaagccgaccattgaaaagcatgtacaagcacttatcctaacaccaacgcgtgagcttgcactacaagttcaagacagtgtacgacgctatggcgatggcatgcgtaatatgtttagcgtgcctttggtgggcggtgcaccttatggcggtcagttgcgtgccttaaaaaaaggcgtacaagtcatcatcgcaacgccaggccgcttgattgaccatatgcgtgaaggccgtgttgacttatcaaaactagatatgctgattttagatgaagcagatcgtatgcttgatatgggatttgcagatgatatcaaagaaattctacaaaatacgccccagacacgccaaaccgtgatgtcctcggcgacttgggatggtgcagttggtaaaattgctgaaagctttacggttaatcctgaaaaagtttctattaaagttgagtcagcacatatcgatgaaagtgtgtattattgtgatgattttaaccacaaaaataatatcttgcttcaagtattaaataaccctaaaattaagcaagcagtgatttttgcagccacaaaaatgtccacagaaaaattggcagcgcagcttgtcgaagcgggttttaaggcacgctatttgcacggtgatttgcctcaaggcaagcgaaatcgtatcgttagcgacatgaaatcgggtaaatgtgatgtgttggtcgctactgatgttgctgcacggggcattgatatttcagccattagccatgtgataaattatgatttacctcgccaagttgaggattatgtgcatcgtattggtcgctgtggtcgggcaggtcgtactggcgtggcggtgaatttatgcagtatcgatgacaatcgtcagcttgagcatattaatcgttatctgaagcgacaaatgagcgtctcaaccatcgaaggattagagccacgccgtaattttggtatccaatcacaagagcgtcgccgtggtcgcagcaagtctcaaaaccgtactcgccaagatggtcgacaaaattttgagcgtactgatcataaatttggtagccgtaatcgccatgaacatcgtcatgagcgttcatttgagggtaagcgtgaacgatttgaggatcgtgaacgcagcgtcaatcgtcgtgaaaatgatgaaaatcatgagcgtcgcaatagtcgctttgaggctcgctctgatcgccgttttgataaaaatagacaaggttattatcaagctgatggcacagctcgccaagataaaaaagcgtatacacgcaattttgatcgccgtgacaacgatcgtaacgatactcgatttgataagcctaccaaaaaatttggcacacaaactgactttgatcgtccaagacgcaacaaagcatttggtgataaggtcaagccaaatacaggttttgataaatttggtggtaagtctcgtccaaaggcagttgaagagatcttttttgccaagcgacaagataaaaaagccaagcgtagatttggtgaattttaagtctttttaacccaaaacacccctcaaagacattttttgagggtgttttttgtgatttaagcatcaatacgctcaaatcgtgcaatgctctcaacatgacctgtatggctaaacatatccatcacaccagcatgtgtcagccgatagccagcttctatgagtgctttggtgtctctagccagtgtgacagggttgcatgagacataaacgatgcgtttggcattaaatttgggcaagtatgccatcacctcccaagcacctgagcggggtgggtcaatcaagagtgcatcaaagcgattattgcccgttgcccatggctgatcgcttaaatcttgggtcaagtctttggcataaaattcagtatgggcaatgccgttggcacaagcattcattttggcgcgttcggtcatctgctcactgccttcaacaccgaccacaaagccactttcgccaacttgtcttgccaatactaagctaaaattacccaatccgcaaaataaatccagtacacgctcacctttttgtaggtttaacagactgcttgccaaatccatcattttttgattgacggataaattaacttgcgtaaaatccaatggcgaaaattcataagtcaaatcaaaatttggtagatgataaaacagaccacctgtgggtggtacagtcagcgaagttgggcgagcatcttcggtatcgatgcgatgtacgctgtctactccttttggttgtaagaacagttgccagttgcgagctgcaaaaaattgacgcaacttagccaaatcttcatcatcaagctcctgcatatgacgcacaataaccgcaaccgatttgatgctgtcaggcacatgtggcagtgtctgccccatggcaatctcaagctgtggaatgctatctcgtgcatttaggtcggtgatgagtgcttttaaattttcaagctcaaagccgatgcgtttatctaagatatggcattcattgagttctgccaaaaagttgctggcgcgttcacgaaaaccgaccagtgccgagtcttttttggcaacatagcgtacacccatgcgtgctttggtgcgatagccaagacgatcgccaaccaaaggcttaagccaaatatcaggctcgatgcctgcttgatgtatgagcagctcttttagtacggactgtttgaaatcaatttgagcatctgcctgccagtgctgtagactacatccgccacacaccccaaaatgtgggcagggtggcgtttgacgctggggatggggatgattgacgacttgtaaggcatcaccttcttcaaaatttttcttagaattggtcatcttaaccaagacagcctcgcccggtaatgcaaagctgataaagacttttttgcctgctttatcaggattgtgggtggtgttatcggtctcataaactgccacgccacgcccatcgtgtgctaagtttgtgatatgaaattcaaggggtggtgtatctgccaaacgcttgcgtgctcgagcagttggtttgccttttttactggggttttgaataagtgaatgcgtttgggtcatgtgaaaagcttgcctgtcgttagatgggtttttaagcattatggattttgaaacaatgaatgaactgatcaaggttttattgtattttatcaatatataatcaatagattatcaatgttaggtgcaccctaatcatttcatcactaaaaatgggtgcggtcatgttaaactgcacattataacataagtcaatcagctgtgggtttgattgagtctgcttggttgtcatgacatgaatccactgatgagtttttggctgatttttatgcgttaaaaatcattgcctatgcaagcttggttttgtgtttatgaaatactggcagatgaggctgtttggatggtatcggcgacagcaggtgttggctgggcgtcaaattcaaaacgcccacccatgctgtggctaaaaacagccatttcttggattttgatattgattgctgtacaaatcatcattcgatttttgatggatatgggcgaagtatttaataactcttatcttacaatcaaataaagcgtcaaatcctaccgtacccaagcatctaaaaagctttgatggcgtagcttgccagctgaattggtcaagctttgtacaaattggttggttttgtcaatgagtgcttggcattcatcggtagaagatttgcccgttaaagtcagccaccttaaataaatcagccaagtatttaggacatcggactcgcaataacaactaagggcgtcccattgagagttttgtaccatcggcaaaacctgcgagccatcaagattgcctttaccagcaaatccacacaaactggcaaccgtatcaagtttttggtgtagtttgttattatgcagtgcagttttgtccatcaaatcaatatgcatctcaccatagcgatatgaatagccaaatttttgggcgctgccaaatagtgctggtgcagataattggtggtgcatagaccgatgcatcaagacaggtaagtcaaaagccaatccattccagctgacaagcacaggttttttatcaaaggctcttaaaaaattgaccaaaatctctttttcgctcatggtttgtagtgtgagagatttaagatgaaaggtcgtgccatcaaaccataaaaatgacaagcaagcgattttatgaagtggtagacgcatgaattctgtgcctgattcagcatgacgcagggcaatgagtgcagttaaagcatcatcatcacccaaatcggccagctctggataaagtcgcttgcctgtttgtatgtcaggtatggtttcaatgtcaaatactaaaattggggtggaaatcatgccaggcctcagtcagtcacaccaaataatcctgtggataaataacggtcgccacggtcacacgcaataaatacaatgaccgcattaggggtatttttggcaatttgatgagctgcccacgctgcaccaccagaggatacaccacaaaagatgccttcttctcgtgccagttttcgcatatagcgttcggcattagtttgattgacatccatgatcgtatcaaccaatgatgcatcaaaaattcctggtaaatattcagcaggccagcggcgaatgcctgcgatggatgactgttcatctggctgaagcccaatgatttgaatggctggattttgttctttaagatattgactgacacccatgatggtgcctgttgtacccatactgctgacaaaatgggtaattttgccctcagtttgttgccaaagctcagggcctgtggtcagatagtgtgcgtgtttattatcggtattattaaattggtcaagtacaatgccttgtccatcagcttgcatctgtaatgccatatctcgtgctgcctccatgccatctgctacctcgatgagtgttgcaccataggcagtcatcgcatctttacgctcttgggtggaattggcgggcattaataaggtcatctgataaccacgcattgccgcaaccatcgccagtgcaatacctgtattgccactggttgcctcaatgagtgtatcacctggtttgatttgcccacgctgttcggcttgataaatcatattaaacgctggacggtctttgacagaacctgcagggttattaccctcaagtttggcaagtaaagtagcttggctatctttggcaagtgtattgagcttgacaagtggcgtattgcctacacagtcagacagcgtggtggtttgatggataaaatctttggtcattgtggttgtctcataaatcatagattatgccaaattatagcataattaaaaccaagccatcagctttgttcaactgggtttggtgtacttatgatactgtttttggtatagtgctacaaaatcttggggtgattatccatgcaaatcaataaagcatttggcataaaaagcgcttatgggcagctgattttgttggtattcttaccgattgtggtattggcatttttaggttcgtacttggtcatgagtgaggtacgccgtgccatactctcagaacaagacaccatggcaaatgcagcattggtacgttatgatgccatcgtgcgtcctttattaacagaccttcaacatcgccaaaatcgtttggatgagcgtgtcgctcagatgaatgaagatgagatattaattgccattacgccacatgataccaatttaccaaatcgtgcgatggctcgccatgctcaagatataccattttttaataccaattggttcgtacaacttcaacagtctcgtaatcagcatgtacttcgagtggcaattatggatggcatcggtcaggtgctttttagtacgggaatgcagacagatttatcttggggagatgttgatttacaagccaaagaaatctatcgcataccaaccgctgtaggcaccgcctatggcaaatcattcatttttgataatgagcgttattggcttttggtggatatggataatacaccattgacgattacctcatatcgggtagcattggcgttgactgccattggattgacgaccattttactgcttttgctgattttaaatatttattctaaacgctggattacgccactttatgagatgcggctgtacttacagcgactaaataccgataatttatcccgtgtaccacaactaaaaaccagtggtgaatttgccttattgcgagatgattttacacgagcggttcgccgcctgcatgccagctttacagaactaaaaaaccatgccgatgaaacagaacatgatttacagcaagcatttgatgaaatggaaatgcaaaatatctctattcgaaatgctcgtgatgcagcaatctcaaccagccaagccaagtcagcatttttagcaaatatcagtcatgagctgcgtacaccattaaatagcattgatggttttattaatttgttagcccgtaaaggtgagttgactggtgagcaaaatttatatgtacaaaccatcaaaaaatcatcagcacatttgctggcactggttaatgatgtgcttgatttttctaagattgaggcaggtaagctgattttagatagccatgattttgatttatatgatgcagtgtatgatgtggttgatatgctgtcaccagcagcacttgaaaagcggctgcgtctggcagtcttattttatgatgatgtaccaactcgcattattggcgatagtttaagagtaaagcaaatcttaaccaatcttgtgggtaatgccatcaaatttactgatatgggcagtgtcgtggttcgagtgagtttggctgaaaaaacaggatatttatgcattgaggtggaagatacaggcaaaggcattagtgaaagtgataaagaacagctgtttcaaagttttggtcaaggtgatttgagcgtcactcgccgctatggtggaacgggtttgggtttagttatctcaaagcagttgacacaattgatgggtggctcgattggttttattgacaatcgcagtgaaaatattgctaatgcaggtgcaactttttggtttgagatgcccatgggtgtggatgaaggttcgattgatgatgccttacctaagcttgcagagttgttgcacacacccatgcaacttttggtttggattaaccatgcaccagcattgcgggtactaaagagcagtttggttggcacaaaagttcaattaacgatagccattggtcttgcagatttattagaaaagcttgataaaaatgagatggattatgattgggtgattgtggataattttggccaagacgctgccaaagatgatgtgggtgccgtgttacgacaaattcgcttacgatatgatggtaagcttgccagttttggttatcaagtgggtatcaacgaacagttgttattgcgttatcagacccaagcattatatgagccgatggataaaaggcagctatatgccatgcttttaaatcagcaaaacctgtcggcgatacaatcacctcgtcaggccaaatttgtggggcgtaggattttggctgtagatgaccatttaccaaatcttttggtgctagatgcattacttgctgagcttggtgttgaggttgttacggcaaatagcggctttgaggccatcgaaaggatgacgcagagcatcacagggtcaacgccacccattgacatgatatttatggatgtccagatgccaagaatgtcaggacttgagacctctatcgaaattcgaaaaattgagcaagcacatttgagcaagcctgtacctattattgcattgactgcccatggtctgtcagatgaaaaagatcagttggtctcatcggggcttaatgattatgttagtaagccaatcggtgaggtacagctggtacaaacgctacaaaaatggcttggtcatgatgtggcagctgataaactcaatgtattggatatggttgaaagtttgcccatacttgatgtaccaaaaaatgccgtcgatgcccctgaaaaattacccgttgtagattggggcgatgcgcttgagcgttcagcaaataaacctaagcttgcctatagactgcttgagatgctcattgatggtgctgactctgagcgtcagtcacttgagcgtgcatgggcagaccgtgaccgtgtcagtttggctgatatcagccatcggatggttggggcagcacggtacgcaggcgtgccaagactgcgtgcggtttcagagatttttgagtcggcatgccgaaatgatatcacggcagtcactccaagccattttattgccttgcgtccagcatatcgggctttgattgatgcgctcgatacattgcaagcagtggagctagataaagtggcgatggatgcagatttggcagattaggcgttaagattaactaaataccagctaggatgaccatattaataggctatcttaatatggtcatgtgatttattgtgtctgattatcttttgtatttacaggtattgataccaagcaagcggtatattgggcaaaaattaatcaggcctgttgccggtagtatcgccccaacaacatagccccatcagccgatgaccgcaaacaaaggtaatacaattaaagcgataccaataacaatacgaatgatacgatcgacttgatgtaaatttgcttgcattacgatacccctaggttagttgattgataatcatttacagtaaaaaagtttaaaaaacacctcaaataggctgtgatagttaaggtgatttgaaaaataatcaaatggtgttttattgaatttcttcaaattctacgccaaaaatatcaaaataacaagcaagtttttagggtatcattgccttttatattcgtcataaaaatggctattttgtgtttaaaaaataagaaaattttctcttaagtcaccaaatttagccattttcatgcaaaaatcattgttttggtttgataaattttacacgataacctgtgttatcagacaggtatattgccaattgcctgacccatcatgacttttttaccgtgagtgatgtgtgcaagccagtcattgtgggcggattttggtaatatgatgatggcagttgagcctaaataaaaacgcccaagctcatcgccttttgataaagttaactcatgggtacgatattgaatgtggggcgtgcgattaatcttaccagttgcgaccgattcaatgcctgcaacaatcattgccccaaccatcaccacagcagctcgcccaaaactggtatcaaataaacaaattagccgctcatttcgtgcaaacaaatcaggcacatgcttggcggttgtgtgattaaccgaaaacagcgtacctggtacatagcgtgtggcagtcaattgaccatcaaagggcatatgcacacgatgataattgctgggtgccaaataaattgttgcaaaactgccattcataaaatactgaccatcgtcataatcagcaagcagttgcccaatctcataggtgcgacctttcgcttgcagaatcataccttgtttgatgtctccaatttgtgaaatcgtaccatcagcagggcaaatcagctgattgggcgtctcatcaattgggcgtgcatctgattttagttcgcgtgtaaaaaagtcattaaaactactataatcagaaaattgactgcgtgcatattcatccaaatttatgtgatacgccttagcaaagctgtgaatcaaggattttttaacatacggattttggctggcggctaggttgcctgcaaattcgctgagcgcctgctgtgggatgagattttggataagtgtgaaaggattcatggttgacctattcagatattttttaagatattttttattttatcataaattttatgatagggtttgatgaaaatttacccaaaatgctctcttaagaaaataccatcttaagattatctttttatggctaagctgaccattgattgatataatgagaatgatttatattttcaaatagaaaagccactgacaatgcagtatgatgtatcaaaatagctctataagatgatacataaccgatgacacctgcccaagccatgataacaccgctcaaaccgacacaaccgacacccaaaaatctcattcaccaaagtgctttgatgcgagcggtgtattttgttttgggcttggtgtgtttgattttggggctaattggtatcgttgtgccaggcatgccgacgacggtttttattttattggcgggctatttttgggcaagaagctcacggcgattttatgcgtggctactggcacatcgactatttgggcagatgattatcaattggcaaacgcatcgtgctattccaagatttgccaaatatttggcttggtcgatgatgagcctgtcaacaatcatattattttttaaattaccaagctcgtggcagtgggtggcttggcttttggcagcgattagccttggggtaggcatatggatggcaagactgcccaatgcttaacagattgtttggttttttaagataaatttaattcattcgctggtttgatgataaagtgtgtttatttgattaggataatacaaaaatattcaaaccattaaatcaaaccattaaagctatcattttttatctaaattcgctatgataagccaatttgactaagatttaggcgatgattaacgaatttgataccgcccatttgtggcacccttacacttctatgacgaaccctttgccagccttgcctgttgcttgtgccaaaggttgtcaaattcatctacaagatggcacggtactcatcgatggcatgtcatcatggtggtgtgccattcatggatacaaccatcctgttttaaatgccgccatcaccgaacagctcaccaaaatgtctcatatcatgtttggtgggctgacacacgaacctgccatcaaacttgggcaattattgcttagcattgtcccaaaaccgcttcaacacattttttatgccgattcagggtcggttgccgttgaggtggctttgaaaatggcggttcaatatcagcatgctttgggcaagaccaccaaaaacaacatcatgacaacccgctcaggctatcatggcgatacttggaatgccatgagtgtttgcgaccccatcacaggcatgcaccaaatttttggggatgctctgcccagtcgcatttttgtggatgcaccaacgattaagattgatgacccttgggatgatgcggccatggacgatattcgcttggcatttaagagacaccataaaaacttagcggcttttatcattgagcctattgttcagggggcaggtggcatgcggttttatcacacaaattatctaaggcagctgcgtaaattatgtgatgaatatggggtgttattgatttttgatgaaattgccacaggctttgggcggacaggtcgtctgtttgcttgccagcatgccaaggtagtgcctgacatcatgtgtttgggcaaggcattaacgggcggttatatgacattgtcagccgtactcaccacaaccaaagtggcacataccatcagccatggtaaggtgggtgcgttcatgcacgggccaacatttatggcaaatccattggcatgtgctgtggcactggcaagtgttcagcttttattacaaagcccttggcaatatcatgttcggcgtattgctcggacatgtcgcatgacattaacccatcttaaacagttgccacatgtcgctgatgtgcgtattttgggggcgattgcagtggttgagatgacagacccggtagatatggcaatcattcaacaagaatgcgtcgcacgagggatatggattcgcccctttggacggctggtttatctgatgccaccatttatcatcagcgatgatgagctggcaactttattgcatgagtttaccgatttaatctgcacaaccttatcacccaattttaaaaaacagtcaatgaacccaataatcaatgaagatgaatgatgaatgaccagttattaaatttttatgccgaacagctgtctgctttaaaagcatcgcacaatcaccgccaattacaacgcttaaaacatcaagggcaacgcattggtgtcaatgacagcaagcctttgctcaatttagccagcaatgattatttgggcattgccagtcaaacatcactttatgaagaattcttagagctgctgcatgaacagcgttggccgtttagtgcgtcttcttctagattattgacagggaattttgaaaattttgagcgattagagaccaaaatggcatcattatttggtcgcccttgcttattatttaatagtggttatcatgccaatatcggtatcttacctgccatttgtgatgataaaacggtgattttggcggataaattggttcatgccagtatcattgatggaatgcaattggctgccaaacatggcaccaaaaccatccgctatcaacatcaaaatctcccccagcttgaaggattaatccaaaaatatcaatcagataatggcatttgtcgtatcattgtcgttaccgaaagtatttttagcatggatggcgatatcacaaatttatcccatcttagccatttaaaggcacaatacccaaaggtgatgctttatgttgatgaagcccacgccatcggtgttcgaggtgggcgtggtttgggctgtgtggaagaatatggtgttatcaatcaagttgattttattgtcggtgcatttggaaaagcattggcatcagttggcggatactgtatttgccatcccattttgcgtgattatctgattaataaaatgcgtcctttgatttttagtaccgccttaccacccattaacattgcttggagctgttttattttagagcaaatacctttgatgaaccaaaggcgtaagcatctgatgaaacttagtgatgatttatcaaaagtggttcacttggcaaagctgccatgcccctctgccagtcaaatcattcccatcatattgggtgataatgctcgtacactaaatgccgccgctgatttgggcagacaaggctatcatgtgctggctgtacgcccaccaaccgtaccaaaagggcaatcacggttgcgaatttgtttaaatagtaccattaatgatgatacaatgacaaagtttacccaagtgcttactcaaatcgtcagaggtgagagtaaatgacaaaatccgctttatcatcaaatcccaataaaatcgcccaaagattttgtagggcccatcaaagctatcgcactcatgcaaccgttcaggcgaagatggcaagaaagcttatcgcctctttaaagatggttaaagcttgtaataccaaaaatactggcatgcaaccttgtcaggtcaaacaacataaacacatatcaagattgctcgaaattggcgttggcagtggtcttttaaccgatgctttatttgagaattttagcgttgatacactgtatttaaatgatttgtatgataccattcaaaccaatgcactgccaaaggatgttgatgccaattatctgatcggggatattgggatgattgatttgccaaaaaccttagatggtgtgatttcatcttctgcactgcaatggatttatccgccagatgtactgtttaaaagagtttttcagactttaacagctggcggattttttgctgccagtacttttgttgagggtaatttatctgaaatacaagcattgacagggcgagggctacgctatgatacgccaaaacagctgatggtgcgtttaaatcaagcaggttttatgattgatgagtttaaggcagatgagcaagtgctttattttgactctccgatggcggtgctaagacacctaaaagcaacaggcgtgacagcagttggcacagagcaggcatgttggagcaagcaaagtttggcaaagttttgtcaaaactatcaacaatttcataccgatgcaggttataccttaacttatcggccgctgctttttgttgctcataaaccaatgaaaccaatgagttcgcctttatgaccacattacccaatcttcaccaaatgcaaggcagctatttcattagcggtattgataccaacattggtaaaaccatcgcaacaggccatatcgcctgccagcttttaaagaatgggcgaacggttatcacccaaaaacttatccaaactggcaatatcaagctaagcgaagacattgcccagcaccgacagatgatgggcgtgggtatgttgcctgatgatgagacgcacctaacaatgcctttgatactaagctaccctgcatcgccacatttagcaagcaagatggatggcgtatcggtagatgttagccatcttttagcatgcaccaaacagctggcagaggcttatgagatagtgctgattgaaggagcgggcggtttgatggtgccgatgatggatgatgtcaaaggtgggctgatgattgattatatcgccagtcaaaattatcctgtgattttggtaagctctggcaggcttggcagcattaaccatactctgctaagcttaaacgccctaaaaacttatggcatatatttgtacgcactggcgtacaatcaagccgatgatggcgatgatgagatgattgcaaccgataccaaacagtatttgcaagagtatctcaaagcccatcacagtgatgccctttggtgggagattcctaagttaaattcagccgactttggcctaaattcattttaaaaaaggcaaataatgaaagcattgatacagcgggtacaccaagcacgcgttgaggtttgcggtgaggtggttggtgagattgatggtgggatactggcttatatcggtattggcaagtcagatgatgttaagcaagcaaagcgtttggtggataagatattaagttatcgtatttttgaaaataccactgacgcagacaagcttggcaagatggataaaagtgtggctgatgtgggcggtggtttgctgttggtgtcgcagtttacactgatggcactgaccgataaaggtcgccgtcctgactttgggccagcgatgccacccaatcaggcagcacaactgtttgatgagttggtttgttatgccaaacagtatcatacgccagtggcgacgggtcaatttggtgctcatatgcaagtgattgcccataatgacggtccgattaactttatcttagaagtatagtatcttagaagtatcatcagcgttttttgggacaaaataacatcatcttttattgtaattcgtccacgacaatttcgtctaaagtgatttgatgaatgggataattggcaaaatcatcaatgttcttgccttgggcgataatcgcagctttatccgccaaatactgttcaagtgtcaagtgaatcgtgcgaaacgccaaatcttgccaagggatatcctgctcatcaatcaaggcacattctaagctttcaacaccaaccccaaatcgcccatcacaagataagttggtcaaatacatggcatggatttgccccaaataaggcatatcaaataagcagtacagcttagcatcggtggcaatagcggcagcttcttcgatggtctcacgcaatgcaccctccatcatggtctcaccaatttccataaatcctgctggtaaagtccaatagccgtatcttggctcaatggcacggcgacaaagcagaattttgttctcatggcgtaccaaagccccacaaatcatctttggattgtcataatgaataaatccgcacgctgagcagacgagacgctgacgactatcgcctttaggaatggtgtaggtggcggcatgtccgcattgcatacagtagggcatcggtctataataaactggctgattaatgaacactacccaaaattatatggtaaatggtaaggatagctttgattgtcatgactgatttagtttaagtcaatttcaccaaaaatacaaatgttatgaacgatttttttagccaaattaagacgcatgctgatccaaatttcgtcgataaaacggcggtttatttgccaccagagcatcgattctctacgcttagccatgccttatctgagtatcacggtgtagatattttgtctttgacacaaaataatgatctgattgcaggggttgatagacaacaactgaatcaagcctatgaacagttgctcattaacaagccacagccccatgcttgcgtgcttgttgccattactgatgagattggcccaaggctattattgactcgccgagcaagtaatttatcaagccatgcaggtgaggtgtcgctggtgggcggtaagcgtgataagacggatcggtcttcttatgaggtggcgacacgagaggcatttgaggaggtgggtctattaagacaagacagcactttaattggatttttaccgatgcaaatctccaaaaaaggtcttttggtacgccctgtggttgtcagtatggcacctgcgatagcagacagtttaatcgccagtgaagatgaaattcagcggttattttgggctgatctgacatatctaaaaacaacgccacccatagattattattttgagcgtcctaattttgggcgagcatatttgcacacaccagcatggctgattgatgatcggcaaattggtgagcctgaagtggtgtggggattgacagggcgtatcatcgccaattttctacacatcggctatggggtgtgctatcagtggtactatcaccttcaggcacaccactgatgtctcaggctggtttagtctctttgagccactaaggctttgagtgcatctggagatgaccataagccttctaggtcataaaatgcccgtgcttgtggcgtcatgatatgtaccaccaccgcacccaagtccaccagtgtccaatcgctgtctttatcaccttcacggccaagcggcattagcccagcttctttggttgcagcacccaatttatccgccaaagctttgacatggcgtttactggtggcctcacaaataacgatgcgttcagcaatttcggttaaatgttcgatttcaagggtcgttatgttttttgcttttaagtcatcaagcgttgtggtaacaagtgcaagtgtttggtctaaattcaaagtcgtcataattgattgataattggatggataacttttaattatagcatatttttgaggttttggtataagccttctttgcagatatatgccaagacgcactcatccatcagcggtgcagcaagcttagtgcgaccatcagcgattagggtgcggatttgactggacgagatgttcatgatgggtgtgtgatctaaataaatcgtatggtcatttgccaaaaattcatccaaattagtagtacactttgttgctactgtctcatcagctggcgtggtatcgacacggtcaaatgcccacaatttgacttggtaaatcagctcatcatacgccttccattgatgtagatttgccaaactatcgcccccaataataaaaattaatcggtcatcaggataagtggacttaagctgtcgtatggtgtcgatggtgtatatcggaggtatcaaagacagctcacgctcatcaattgatatattcatgcctttttttatcaagggtgtaatggcaagcttgagcatgacgatgcggtgtgcatgcgatgtcggtgcgtttttaaagggattgccagccgttggcaataggtgaacggttacagtgtcagtggttttttggtgtatggtgtcatatgcacttagcaccatctgcagatgtgcccgatgaatggggtcaaacgagccgccaagataaagtcgtatcataatcgaattttttaggtttttaatattgtaatcattatgagacaaaaaagccaatttaaacaataaaaccgtacatgaaatccatgtatttattacaaaacccatctgccaaatgctttaaaatatctagaaaatccccattttcttattaaattcttctataaaaaaggcgttttcatggctcaagataaaattgccatccgtggtgcacgcacgcacaatctaaaaaatattgatgtagatattccacgagataaatttgtggtgattactggcttgtcaggctcaggcaagtcatcacttgcgtttgatactttgtatgccgaagtcaacgccgttatgttgaaagtttatcagcatatgctcgacaatttttaagccaaatgcaaaagccagaagtagatagtattgatggtttatcacctgcaatcgccattgaacaaaagtccaccaaccacaatcctcgctcaacagtaggtacaattaccgaggtatatgattacttgcgtcttttgtttgcacgggtgggtgtgccttattgccctgaacatgatgagccgatggtcgcacaaacagtcagtgagatggtagatgggattatgagtttgccgactgagaccaaattgatgattttagcacctgtcgtgcgtgagcgtaaaggtgagcatattgctttgcttgagcagttgccatctcaagggtttacacgcgtgcgtattgatggggtgatttatgagaccgatgagttacctagccttgaaaaaaataaaaaacacagcatcgaggtggtggttgaccgatttaaagtgcgtgatgatttgggaaatcgtgttgccgaaagtttggaggttgcattaaaacttggtaatgatatcgccattttgtatcacatggatggtaatcctgttggtgatgatgagcagatattatctgctaagcattcttgccctgtatgtgaccgtgcggtgagtgagcttgagccaaggctgtttagctttaataatcctgcaggtgcttgccctgcatgtgatggcttgggtaagcgtcagtattttgcggccgagcgtatcgttacccatcctgaaaaatcactgaatcaaggtgctattcatggttgggataaacgtcatgcgtattattttggcttattatcaacggtttgccgtcattttggcattgatatggatatgccgtggcaagacttatcaaataaacaccaagcgattattttaaatggttcgggtagacaaaaaattgaatttaattttaccgatgaacgagggcgtaaaacgaccaaaaacactccctttgaggggattttgccttatctagaacgccgttatacaaccacaaccagtaatttggtgcgagatgagttggcacagtatctatcagatacccagtgcaatgtgtgccatggtgtacgcctaaatgatattgcccgccatgtgcgtgtggaggataaagccatcggtgatatcatccatctgccgattggggaggcgtggcaatattatcaaaacttaaaaattactggtgctaaaggcgaggtggctgataagattttcaaagaaatcaaagagcgattgggttttttgaccaaggtcggcttggagtatttgaccttggcacgctccgctgaaacgctgtcaggtggtgaggcacagcgtatccgcttggcaagtcagattggtgcaggcttaatgggcgtgatgtatgtacttgatgagccgtctattggactgcatcaaagggataatgatcgacttttgtccactttaatacagttgcgtgatttgggcaatacggtggtggtggtcgagcatgatgaagatgccattcggcaggcggattatattattgatattggcgttggagcaggcgtgcatggcggccgtgttgtggcatcaggtagtgcagaacaggttgccaacaccacagggtcgctaacgggcgagtacctatctggcaagcgacgcattgaggtgccgactactcgccaattgcctaagaccatcgagataatcaaaggtaaaaaaaccatccaagagccattatggattcatttggagggtgcaactggtaataatctaaaaaatgttcatcttagtattccgattggtgtcatgacctgcattacgggtgtgtcaggttcaggtaaatccaccttgattaaccgtacacttatgccattggctgcgactaccttaaataacgccaccacacttgctcctgaaaaatatgaaaaaatttcaggacttgagcatttggataaaatggtggatatcgatcaaagtccgattggtcgtacaccgcgttcaaatcctgccacttatacaggcgtgtttacactgatacgagatttatttacccaaacgccagaagccagagcgcgtggctacaaagcagggcggtttagttttaatgtgaaaggcggtcgttgtgaggtatgtcagggcgatggattgattaaagttgagatgcattttttgccagatatgtatgtgccgtgtgatgtgtgtcatggtaagcgatataatcgtgaaactttggaggttaaatataaaggtaaatccatcagcgatgtgcttgatatgactgttgaggaagcgatgggattttttgaacccattcctgctattcatcgtcgcctagaagcactgcatgaggtgggtcttgactatatccgtttgggccagtcggcaacgactttatcaggtggtgaggcacagcgtgttaaacttgccaaagagcttgccaagcgtgatacgggcaagactttgtatatcttagatgagccgacaacggggctacattttcatgatatcgctaagcttttgcatattttacatacattgcgtgaccgtggtaatactgttgtggtgattgagcataatttggatgtgattaaaacagcagattggattgtggatttaggccctgaaggtggtagcggtggtggtgagattgtcgccacaggtacgcctgagacagttgccaaaaatagccgttcacatacaggcagatttttaaagcctatgcttaagtgaagcttgctggcaaataaattatgaaataattgtataaatttaccaaaaattgatggcaatttatccaaaaatttcgtaaagtatacttaattttaaccatttaatgattacaatttattaaaaaaccagcaaaggaaattttatgagtgttaataaagtcattcttgtgggtaatttaggcaatgacccagaagttcgtaattttgataatggcggcatgattgcaacggtatcaatcgctacctctgaacgctggacggacagaaacacaggcgagcgtaaagagcataccgaatggcatcgtgtggtatttaataaccgattggcagaggttgcctcacagtatctgcgtaaaggttcacagatttatgttgagggcagtttacgcacacgcaagtggcaggatactcagacgggtcaagagcgttataccacagagattcgtgcggataatatgcagatgcttggcaatcgtgcaagtggcgataatggcggttatgccaattcccaaggtggttatgccaatccaaatcagcaatatcaaaatcagggcaatcaaggcggacagtatccaaatactgcctatcaacaagccaatcaatttggtggtcaaaattcatcaggctatacgcagcctcagccaaaccaagcctacccaaattcaggttatccccaagagcgagcatctcagcctcagagtagctcgatggcacaaaaccatgcttttgggcaaccaacacacattgagcaaaatacaggtatgtcgcctatccaaaagccaaatacgccatcgacaaatcagcctgtcatcacgccatcacagggcttatcggatgatgatatgccgttttaatcgtcaaagtcatgattgttcaataaaaaaatctcaagccataatttgcttgagattttttttattgattttttgattgatattaagttaatcagataaaggcgtgtgggacaaataagctggtatctttggtgatgagcgtgctgtcctcacgaatgccaatacctgcagcactgtgaccgataatccaactaccaatgactgcaaacacatcttgaccttgattgttgctaaatttgggtaagggtttggactcttggtagacatacccttcttgaccatattgtccatgcgttgagagtgtttgattggcatgagttaagctgatatttgcaccttcacgagaaaaaaacggctttttaaccacatttgttgaaatatcgtttggatttaggcttgctgcaagcagattgggatgatttggaaacatctcccataagacagtcaataatgctttattgctcatcaagagtttataagcaggctcaatcagatgaatattgctactggcaatatgctgtccaaattcttcagcaagtaaccactcccaaggatacagtttaaacagatggtgaatgatattgttatttaaatcagtaaattgaccatcactcatgcgataaccaatattgccgatatcaatataatcagtctgtagcccagcttgaatggcgacatcttgtaggtattgtgttgtggttaaatcctcaatactgtctgaaacagcggttaaatacagcgtgtcatgaccaagcatcggctttaatgattcaaactctacaagcagtcgttcatgaatgctattaaactggtcagctcctcttaatataccaccttgagcctgaagccaataccactgggcaacgcttgcttcaaataaagcggtgggcgtatcggcgttatattcataaagtttgggcgggttgataccatcaaagcataaatcaaaacgcccgtataaactgggtgcttgtctgccaaaactgtcctcaatctgcttagcggcgatatcatcaatgccaagtcttgcataatcgccagtttttaccacatgggcaactgcttgtacatacatatgatgcaatgtgttggtggcatcttctagcaaatcaatttgggattcggtaaatacatagcaggcatcttcttgccaataattaccatcaatgctgtgataattaaagccaatgcgtgccatttcgctttgccaatctggtcgtggtgcaacagtgatacgcttcatgaggccgaacctgtcgcaccgcctgtcgcaccaaaaccttggcgagtggtgccagctcggttgtcttgggtggcttgagcgaggctttggcgattgctgttggtggcttgttggttattttgtgctggttgctgtgtggttgttggtgtttgggcggtttgtgaagcttgagcggtagcagcacgattaccagcaactttgcttgcaacataacctgccgcagcgcctgctgcagcacctgccagtaggctaccgacaccgctaccatcggcagaagttgccttggtttcatggctggcatctgcttgtgcttcttgagcttgcatttcaagctcggcagcttgggcttgtaaggcggcggcttgctcttgaagtgcttgtgcttcagcgttggtgtattgtagaggttcttgttgttgcggctgatgttctgcgactgttggagattggggtgaacaagcagcaatgccaagcccagcaccaccaagcaaaaccaaagagatgtgacgagaagatttgcgagtttttacagaatttgtcataactatgcctaaaataaagatactttctttcattatgccgacaaatgcttggttttacaagtcggtgtcggtaaaacagccctgtaaatatctggtttatcagcaaattgtatatgagcgatggggggtgatgtgatataataagatgtgtttatattctctttaatgattaataagtattcaatagctaggtgatttatgccaaaaaacaacccggccccaaatacagttcccaaaaatggcggatttgttgaccgcctgtggcaagggtttttaacaaccgttggtactgagcgatttttctatattttttcaccttgggtgaagtatttggctacagtcgccgccttgttgcttggcacaggtttggtttgggcgcttggttttgcgccacctgattatctacagggcaacagctatcgcattatctttattcatgtacccacagcaagccttgcgatgagcatctattttgctttaagtgtgcttggtgtgatttttttggtgtggaaaattaagaccgctaacattgtcgcccaagcaattgcacccattggattcatcttttgtgtgatcagcttattgacgggttcaatttgggcaaaacccacttggggtacttattgggtttgggatgcacgcctaacctccatgctgattttggcgtttttgtatgctggtgtgattgcgttgttttctgcttttgaaagtagcagcaaccgtggcaaagcagctgccattttatctatcgtgggtgcggtgaatttgcccatcatcaagtactctgttgaatggtggaatacgctacatcaaggtgcaacatttaccgttaccaatgcaccaaaaatgagtgcatccatgtgggtaccacttttaattatgattttgggcatgtactttatggtggcggcaattgctatttatcgtaccaattcattgattttggctcgtgaagccaataaggcttgggtgatgcgattgattaatcaaagtcaggaaggtgtgtgatgacaccatattttaagtcaatgagcgaatttattgcgatgggtgatcatggttattatgtgtggctatgttatgcattgactgtgattgctattttgggattaattatttataccaaaaatgagcgtaaagttaccatccaaaaactcagtcgccagcatgcacgcggacgattaaccaacaaacagcgccgtcagtaggtgcttggttgaatttatcgctgtaatgagcatttgagcatatggcgacttaaacgatgtgggggaatgatgaactctgtacgacaaaaaaaactgatgtgggtgctggcagtgctgctgggtgctgtcgtggcggtcagtttaattttatatgccattcgcaatcagacagattattattttgatccaactgcgatcgctgcaggtcaagctcctgaagccaagcgtatccgagtagggggcatggtggttgcaggcagtgttcagcgagaccccagcgatcagctgaacatacaatttaaaatcaccgactataaatctgttgtaccggtcagttatcgaggcgttttgccagacttgtttgccgaaaattcgggcatcgtagcgacaggtgagctacaagatggcatgtttgttgctggtgaagtgcttgcaaagcatgacgaaaattatatgccacctgaagttgccaagtcgcttaaaacgcagcacgccactcgtggtaccgatgttaataatgggcagtttgtacctgcaacaccaatgagcgaaattgatgagcgtaatgcagttcaagatactaagcgttaaagtatggctttgatggttcaataaaaatcctccaacggttggaggatttttatggtcagatcggtcagattaccagcctttgataacaccatctttaaattgctttttggcttcagcttccacttcatcggtttgataggctttcacaaagtcttggatggccttagagtctttattgtcagcacgagcgacgatgatattgacataaggcgagtctttatcttcaacaaaaacgccattttcactggctgttaaacctacttgacctgcatagttgttatttaccactgccaagtccacatcgtcaattgcacgagcagcaactgaggtatccacttctttgatgaccaatttttttggattttctacgatatcaagtgtggttgagaataggttggtgttgtcttttaatttaattaagccttgtttttcaagtaaaattaatgcacgagctaagtttgagggatcatttggaacggcgatggttgcaccatcttttagctcatttaatgtcttgattttggttgaataacctgccaatgggtatacaaaggtgttgccgacgatgaccaagttatttaggcctttttcttggctgtctttttcaagatagggtttgtgctgcatggcattggcgtcaagttcaccttttgagacggctgagtttggcatggcatagtcattaaactcaaccaattcaacggtcaggttgtatttttctttggcgacttgacctgctacctctgccacagcttgctcaggacctgccatgacgccaaccttgatagtctgtgcagctgtatcagatatggcagctggttcgtttgattgattgctgcagcctgccaatgcgatgccagatgccagtgcacaaataccaaaaattttaccaaaattcataaaatgaccttacaaaataaaattatatgttcaaaaatcgcttaagtattgaaaaaagctataaaaacttatctattaaagcataaaagatattaaagcataaaagacgagaaaagagcaagcgtcaatgatgatatttcatataaaaacttatgaaatttttcaattttttatcgattgattcagcttggctatcggtggtcaactttggctgccaagacatcgccggctttttgaaaaatcatcacaatggcaacaatgatgatggttgaaatccacttgacatataccatgttgcgatgctcaccatagttaatcgcaaggcttcccaagccaccaccgccaaccacacctgccattgcagaataaccaatcaaagacaccaaggtcaatgtgaccgcattaatcaaaatgggcaggctttcagcaaaatagtatttgctgacaacctgccaatgcgttgcacccatagatttggcagcttcggtcagtcctgtgggtacttctaataaagcattggcactcaagcgtgcaaaaaatggaattgctgccacactcaaagggacgatggcggctgttgtgccaagggttgttcccaccaaaaatcgtgtgactggcatgagaataatgagcaaaataataaaaggaacggagcgaccaatattaataataacatccaaaattacaaatacactgcgattttcaaggatacgccctttatcggttaaaaatgccaaaaaccctatcggtagcccaaccaaaacagcgatggcagtggcagcaagccccatatagatggtttcccaagtggattgggcaaccatctcccacattcttgggtgcatttcactgacaaattttgtgacgatttcattccacatagccgataatctcaatattgacccgatgggtggttaaaaattctattgcttgcatgaccgaggtgccttcaccgataagctcagcaatggtaaagccaaattttatatcacctgcataatccatctgtgaggttaaaatattaaaatctacatcaaattgttttgaagcaagcgaaaataacggcatatccactgaattgcccgtaaattcaaaacaaatcacaggcgacaatcccaaggcaggttcggatttgagttggctaagatagctgtttggcagaccgatatgaaatgtcgaacgaatgaaggatttggcaagtttggtttgaggattggcaaaaatttcaccgaccttgccttgttcaatcagcacacctttgtccatcactgcaaccttatcgcaaatacgcttcaccacatccatctcatgtgtgattaataacatggtaatgccaagctcttcattaatcttcttaagcaaagttaagatagattgggtagttgcaggatcaagtgcagaagttgcttcatcgcacaaaagaacctttgggtcagatgccaaagctcgtgcaatggcaacacgctgtttttgtccgcctgatagattggcaggataaacctcttttttgtcgcttaagccaaccagctcaagcagatcgcccactttactggcaatcactgctttgggggtgcctgataattcaagcggtagggcaatgttttcaaaagtcgtacgagagtgcaaaagattaaagtgctgaaaaatcatgccaatttttcggcgttgagtgatgagttcacgctcggataaggctgtcaaatccacatcatcgatcacaacagagccttcacttggtcgctcaagcagattgacgcagcggattaaggtggatttaccagcacctgaagcaccaatgatgccatagatttcaccactttggatggtcaaatcggttggctgtaccgcagtaaaactcgtcgttttaccctctttttcaataacaaaatgtttgctaacgcctaagagggtgatcatgggcgagagggagtgtgtggacatcgttaaattgccttgatcaatgaagtaaaccctatattatatcatacacgaaccaaacattaaaatggtgacaatgatgcttatcaatatttaattaatgattggtgggtttattcttaatgtctaagacagtggttttgatttggcagtcagtggtaaaatcaccaaaaagcgtgtatgcccaagccaagtatctgtgatgattgtcccgtgatgagcttcaacaatctgtgataccaatgatagcccaagccctgacccctttttttcttgttttaggcgtacaaaagggctaaaaatgtccttacgcttatccttgggaatgcctaagccttgatcgataaaagcaagcactgcaaaatttggctgatctgccttttgctctttatctttgggacgagttagacgctttaaaaaatcagtcggggttttgttgtctaaagcgcttgcttcatctgattttgagtgtaaaatatcgccatcaccaatgttacaaaaactgtctagcaggtactgagggattgaggtggcttcttgaatattggtggcgtgatacagataaacttgaacaggcggtatgccatgaatcatggcattattgagtaggttacgcaccaaatgcgtaagcaattttggctgagccatcatactcactgactcaccgataagtgtcgcctcaggatagtgctgcacttctgagcgaatcagctcatacaaatcgacttgttcggtggcttgcagagcgtgtcctgcatccagccgagacaccaacaaaatgctttcaaccaagtcatttagccctgttaaatcacgattcaccgcagcagctcgtttatcaaatttggcttttgtagtttcatcaagctggcttgttagcatatccatcatctcaatttgtaagcgaatccgagtaatgggcgtacgaaattcgtgtgaagcgtgcgcaagtagtaggctgtgtgcatcaatcagctgttcgattttttgggcggattggttaaatccatgtgcaagcaccgcaatctcatcattaccctcttcgctgactcgcacactaaaatcaccttcacccaagcggctcatctgtcggcttagttgattgattcgccaagtaatactgtgcgaaatccaccaaagtactgccgacatgatggtaaataataagactgtgcctgaaaatagattaaaccatgccatcaaagggcgttcagggctaagaatgcgattttcgtaccataaagaatagccaagtgtgctattgaccacaatgtgggtgggtgatggtgcaaagatttggctaatccatggtggattaggcacaagcgtttcaggcaagtcggtattttcggtttgtagcatcagccgcccttgagaatcatacagcccaattttggcattcaagctttcatcaaaaatatcaaaactttttttgataacaaccaaagaaaatctcgcctgaagcaaattatttttagctgataaagtgtgtgcctctgccaaaaatggctcaatttgattcataatttgactggcaatagctcgatttctggtataatcagaattattatgtgcaaattgtgacaatagcacaaaagcaatggtaaaggtcaaaagtgccaaaaaaacgctgataaataatcgtgctgaaatggagcgaaaaccaaattttccataatgtaccaagttcataagacgaccaactgttgattaaatggtgaatcatgacaacatcacaccaagtcactgggtggctaagctgattatcccaaaaaatgcagaaaaaccatcaagcctatcgcctgatggttttggataacaatagatttaaacttgatcggtggcaaactgatagccaacgcctcgcactgtgatgatacgcttgggctggcgtggattatcttcaatcaaagcgcgtaatcttgagatatgaacatcgatggcacgatcaatattttctgagctgtcatcgtttggcatggcttgccaaagctgctcacgattgagtactttgccagcatgcgtagcaaaataatgtaaaagctgaaactggtgtgtggtcagacgaacggtcttttcatcaatcgtgacctcatggctgtctggataaaccgtcaaacgaccaaaagttaggctgcctgagttggtatctgcttgatttggcgtttcgtgacgacgcaagacagcacggatacgcgccaatagctctcgtggctcaaatggcttggcaatataatcatcagcacccatctcaagccctaagacacgatcggtagtgtcccccttagcggtgagcataacaatcggtactttgttaatcatggtattttttgaaccgcgtactttttggcacacttccatgccatccatatctggcaacatcaaatctagaacaattaaactgatgtcacgctctttggtatccaaaatatccaagccaccttgaccagttgcagcgtgatgaacttcataataattcatggatagataatcactgatcagctccgccaaatctggatcatcttcaatcagtaggatttgtttattcattttagtacctttaaatgatagtgactcatagagctatcttgccaagttttgtctgtgttcgcaagtgtatatttgtagttaaattgcataaaaattggtcaattctctgaagtttagcaaacaatttcaagaatgtgtaacatttatcttgccgtatttggtgatattacggtcaatattttgtatttgtggtcttagtatactttgactggcttatcatgtgcgtcttttggtaagggcactgtggcaacaagactgtcttcggtgataccttgcactaaaaattgctgagttttgggatggtattccaaaacttttacaggggacagggacagtcggtggtcttgttttacgacccaaacatagccatcaatcggagcatctggcttatgtggtggcttatcaaatccatctaacgctaagatattcaaatcgctgtcataaacagcgctgctgggcatcatgaccccaacttggatttgtccataatcaatatgcccaaccacacgccgcccaagcagatctttgggcttttcatcaggattgggttcgatgatgacatgtacttcaatgagtttggggttttgttcactgacattcacttggctaatctgtccaacatgagcaataccatcaaccccaaaagttaccgcatcgcccaatttggtatcattcatcagtgcagaagacaaatagctgatgaattttaattgagaaatatcatgaatctcaattaatggcgtattggcatcatagtgctgatctgtgtgggcaaagacacgatgaaccaccccatcaaatggcgcaggcagggtagtaacttcgctgggcaaagattctaaatgggtgaaataaccaagtagtgcatcgcctttggaaacctcatcacctgcatcaacaaaaatatgctcaacgatcacagcagtatcaagatttaatagggtctgattggctgggataattttaccatccaaaggcaaaacttggctgatatttggacatcttgacggtcatgatgctgtctttattaagtatgatgccatcatcagcaggtttgattataggggattttgggcggtcatcactacaagcactcatcgccaaccccattgccaatgtggcgatgagacttgatgtgaaaaaacaatgttttaagcatatttttgagaggttggttgaccgatctttatgggccgtcatgcctatccttatccgattgagtattgtataaactcatcttagcatgatttttgatgaaagtgatagtatcgcttttaatcaaccaaaacttaaccaaccaaaactgtcagtaggtatggatacaaaatatcaacagttacagaatattagcttgaagatattttgataaaatagatttgtttttaagttttatttaattgaggtatgccagtcatgactcagataacctctgctcgtgtgataaaatataatttggcagcgcgtatttttcattggatcggtgcattattgattgtgctggcttggtttttggctcagcaaggcgaggattatcttagcctgcataagtcaattggggtgagctttttgatttggacaatgcttcgtattgccaatcgagtatttaccaaagaccctacaccactgccagtttcaaaaatctataccgtgatagcaaatgtggttcaccttgctttatatgtggcgatgattgtgatgcctttgacggcgtttttggcatccatgtatggcggctatggggtgaatgtatttggtatcatcagtatttctggttttaagatacccaataccgagctggcagataggttgatagattggcataccgatattgtgtggccaatgctattagtctttgtggcagcacatatcattggggcgttatatcaccaatttatcctaaaagatcatattttatcacgcatgcgttaaaaaattccgccactgtttggcggaatttttatgattggcaaatgggttaaatatcatactcaaacatggcgctgattgactcttcattattgattcggcgtaatgattctgcaatcatcgaggcaatactgatttggcgaatattcgcacaagcagaggcagcttcagaaagtggaatggtatcggtaacaaccagctcatctagggcagatttttgaatggtttcgatggctttacccgataaaacaggatgggtaatataaccaaccacacggcgtgcaccatggtctttgagtgcttgagcggctttacacagtgtgctgcggtatcaacgatatcatcaacaatgacacagtcacgaccagatacatcaccaataatatgcatcacttgagattcattggcacgagcacgacgcttgtcaataatggcaagatcagcatcaccaagtaattttgccatggcacgcgcacgcaccacaccaccaacatctggtgaaacaaccattaagttttcatagttttgttgcttaagatcacgcaatagcacaggcgtgccgtataagttatcaacaggcacatcaaaaaagccttgaatttgatcggcgtgcaaatcaaccatcataatacggtcaataccagcaatcgacaacatatcagcgaccaccttggcagagatgggcacacgagctgaacgagggcgacgatcttggcgagcatagccaaaataaggaatcacggctgtgatacgaccagcacttgagcgacgcagtgcatctgccaataaaataacttccatcaaatgatcgttggtgggtgcacaggttggctgcagaatgaatacatctttacctcgaacattttctttgatttcaacagcgatttcgccatcagaaaaacgattgatgtctgccttacccaaaggaatgtgcagattatcggcaacggtttgggcaagtttagggttggcactacctgaaaagacagccatatatgacatggtaaaaatcctataaaagcgaatcgaaagctaacataaccaattgagattatattttagcatttttgaaccataatttgcaggggatatggggatttttgaaaagtttttataagactttatcggtttttttgataaaaaacatcttggttaaatagaaaaatcttggttaaactgaataaaaaaattgggtcaatcacgaatgactgacccaatttggatatggcagaggtagctggactcgaaccaacgaatgtcaggatcaaaacctgatgccttaccaacttggcgatacccctgtaggtactgattatattctcagcaaaagaaccttgatcggattctttggttcggtactatgaccgagagtctgatacaatgtatcggacaaaaatcccagaggtagctggactcgaaccaacgaatgtcaggatcaaaacctgatgccttaccaacttggcgatacccctgtatagggcaaaaattataccaaattttaaaatgaatgcaaccatttttgcataatttgtcttaaaatttatgcaactcattgaaaattatataatttttaatataaattttgtgtcatgattgtggggcatggtgcagcagcttgccagtgtttgagcattgcgtcatctatgttgtcaggaatgggtaaaaataccgtactgccagtacctgttaagcgtgcggtcgtaccagtgaatacttgtcgtgattttagatattgaagtgccaaggcaacggcgggcgagtgcatgacggcaatcggctcaaagacattgaaaaacgcatcggtcatagtattgccatagtcatcatagcgactgccaatatttggtatgggcaagcagtttttttgtaagtcagggtgtgcaaaaaactgagctgtggacagatgtgcctgaggaaataagagtaaataacgcgctgagggcagcttaagtggtgttaaaatctcaccgatgccacagacaatcgcatcttgttggtgaaagtgactaaaaataaaaaatggtacatctgcaccaagctgctgaccaaaatcaatcaaagcttgaagcgataaatcaagcgcccacagctgattgagtgcgatgagtgtcgtcgcacagttgctggagccgccgcctaagcctgcacctgttgggatatgtttttgcaaatcaattatcaacggcttggcgtgatttggaaagtgtttggcaagtaaggttacagctttgacaatgagattttggtcaagctctttggttaagccctcagcacctgtcagcgtgattaaaggtttttttgtatccgtgagaccaaagcttaaccaatcaccaaaatccagcgtacgaaagacgctttgtagatcgtggtagccatcggaacgcttgccaatgatatgcaaaaataaattaatttttgctggagaaaaaatctttaaagccatgttcttattgatgtgttactgtcatggttatactgtgctggttggtatgtgtgatgcgaaggcgtgacggcaaagaggttttgtcgtaatcaaattgggcatgccatgcaccattagcagcagacaccagccgacctaagtgatcatagccggctgtgctgtcatcaggagcgccgcgtcctaagatccagtgtggtagctgagagattggtgcttgccagcctgttgcagtcaataaaagtgcttcaggcgtatcggcagttatcgtgcctgtgcgttcactgtccaaggcggcagttgtcccgttataacggatttgggttgcaccaataccaagcatacctgtcaattcaatagcgaagcgatcatcttcttgtgtccaagtataaaaggcactacctgcttgcctaccttcgggggtggtggtaaccacgccgattttacctgtgaccgcaaatttaagaggggtgtccgcagtaggcaggatggtgggcgtttgggtgcttggttgtatgttggtacaagcacttaataaaagtacggatacactcaaagcagcaaatgcaatttttttcacaatctgtctcctagatgcttaagagtttttaataaatttggctatcgtcagcaatggcactagagttggcaaaacgagactgtaagtcagccaaaagatttgctactgcttcattattaccaagcccttgataagctcgaagcagtgtaataccaacattaagattgggcatcacttcataaggtgcttgcagataatcaatgactgcttcataattttgttcagccagtgcgtgattaccaagaacaagcagggcatccaactgaagctggctgtcatactctggatcatcaaagctgatattgctaatctctgaggcggtattgagtgcatcatcatcattggcgttttgactgaggcgaagtttggcatctgccaagcgatagcgaggattgtattcatcaatctcaagcagtcgatcgatggcttggcgtttatcttgtggctcaagttcattttcgagcaattgaaaactggcatacagcaagcggtcatcatcaggatattcacggtttgcgaccgtcagcagatctttggctttttgttgattgttttgacgcaaataaatctcagcttggaggatatagctgtcggtggcgtaattttcaaattcatcacgcaggcgaatcagtgttttgatggcatcggtcgtgttattatccgccaaataaaaaccaacgactttattggtggcatcaagcacatgttcataatgatgtactttttcaaagttttctcgtgcttgttggggattgcctaggcgttcatagccaataccgatataataatgcgcttgacttgctatctctgtattcttagttaaaggtttaagtatctcaatggcatcggtataacgaccgctgtcaagtcctaccagtcctgccaagagtataatgtccttatcttgagtatttttgacagcttgtgtcaaaagttgccaagcttgactaaggtcacccacttcaatcagatgccgagcttcgtacaaataaagctctttttctttgggcagttgtttgcgtgcttgatgtagatagttccaaagttcatctaactgattggcagcacgcaagatatctaattttagggtaataaatgccaaattatttggctcaatgcttaaggcttgattgacatgcaggcgtgccgcttgataatccgccaatcccatcaagatccccgctctaagtacagagatggacgcattgttttcaccaagaccctgtaaagcgtataataacgctcgtttatcttctcgtttgggtggtatgataccagtcaagatttgccctaaatctgagcgtggatcgtagtgtaagatggttgatatcattgcggccgcttggttatattcacccgcttttagtgctaagtgggttacataaaaccaagcaggaatatggtcaggattgcgatcctgccaagcggtggcaaacgccaatgattgagcaggtgtttcatactcaatggataaagataaggcacgctcaaacacattggtggcgttttttttaaaagattctgctttataaatattcaacgctcgtctgatatcacctcgatcagcagcaaattcagcatccatcagtgcatataaatcaggtatgttgagtataggctcaacattttcggcgatcagtgtatcttcgagcaaaatctcaggaatgttggcatatcgctttgttgtctcagcttggggtatgaccaccgaggacgcttctttatttgtatgcgtatgagcgggtgtctgaataatatcatcttttaaaggctctttgggttctactaaaggttctttagcttctccctcagcttttggtgattttttataaaatggcaataaaatgcgtaacaaaggatcaaagatattggcgtgcgtcggtagagtggtggctaccatcaagcctgcgagtattgaagcggtcaggatggacttggatattttcaaggttttgtcagaatttttgggtgcaggtgtaccttgatgtgccaattttgagacatcgtgtgagtgataccgccgtttacgccaaagccaattcataacttaccaaacacctcctgagtgttagatgattaagtcaacttaatttaaaggtacaatacgctctattataaaagtatttttgataagtgcaaacaaaaccgtctaaatattcaaaactaaattggataacattgtgtaaaatcgtgattaggctttaattttgtatccttttgaccaaagcgtatcatgaatacctgatataaaagtatcaaagactaaaatttaaaatagtcaataaaataaacttgtaatttattggcgatgatagtatcaaagctgttataatagtgagtttttaactagcaagatctttggctttttggtcgtttgtatgaaattagctgtcatcggagtcaatcataagactgcccccgtttcattgcgggagcggctttcgtttggctcggatatgcctcaggcaattgagcaactatcaacattggcaaatggctgtaccatcgtctcaacttgcaatcgtagcgagctttatgttggtatcgttgatgatgtgggcagtcagcacgagtctcaagatgagcaatcaggcgggctaatttctgctaagcttcaggcgattggtgaatggttggcagagtttaagggcatttcatttgatgagattgctccttatttgtatacttatgaagactcacgtgcacttaatcattggctaagagttgcagcaggtttggactcaatgattcttggtgagccacagattttaggccagattcgccaagcggttgcactgtctcgagagtatggcggtgtagacagtgattttgggtggctgacgcagcaggtttttgctgcggcacggacggtacgccgtgataccaaggttgggcagcaagcggtaacattaggttttgcaaccgctcgtcttgctacgcagatttttgatgacccaagtgagttgaccttcttattggttgcagcaggcgagatgaatcgattggttgcacataatgtcgccgctttgggtgttaaaaaaatcatcatttgcaaccgaagccctgagcgagcccaagcactgtcagatgagctatctgagatggctcagcaggcggggcgttttcttgagattgagcttgcaggtttggacagattgggcgaagttttaccacacgcagacattgtcagtagttgcagcgggagcatgcaggcactcatagataccgccatggttaaatatgcgcttaagatacgccgtcatcagccgatgttgcttgtggatttggcagtgccaagagatattgatcctttggttggacagcttgataatatctacctgtattcggtggatgatctacagcatgtcatcgcaggtaatatcgctgagcgtaagcaagcagcagttgaagcggagcttttggtcggtcagctggtagcagatatcgaagcacagatgcaaggacaggttgcccgcacgcatatccgagattatcggcaaatggctgaggcacgcactcaagttttacttgcacgggcgatgtcacagattgatcaaggtgatgatgccaaagcggtgttaagcgagttttctcatacgctcagtcaagcacttatgcacagcccttcaaggctgattcgtcaaattgccaaaacatacgatgcagataccctagatttggtgtcgcatgaactcattcatagttatcgtaagccaatttaaatattgtattaagataatgcttgttgttttcactgtgatactttaaaattaaaaaacaaattaaaaaacaaaataaaaaacgcttcatgatttgatgaagcgtttttaatatttgtcacatattcggatagttagggccaccaccgccctcaggtgttacccaagtaatattttgcgatggatctttgatatcgcaggttttacaatggacacagttttggctgttaatcacaaatttaggcgtcttgccttctttgtgtacaatttcatagacgcctgctgggcaatagcgttgcgctggttcagcataaagcggtagattgagtgagacaggcactgctggatctgtcagacgcagatgatttggttgatcttcggcgtgattggtatttgagataaacacgcttgataatttgtcaaaagtcagtttgccatcaggctttggatagttgggcttataggcatggtcagccttatcaagtgttgagtaatctggggtgttgtcatgaatggtcaatggcattttaccgccaaataagttttgctcaacaaaagtgaacacaccgcccatccaagtacccatgcgatgtaatgatggtgagaagttgcgagcttgatgagcatcttcaaatagccaagaattctcaaaagcagtttgatattcgaccacttcatcagagctgcgtcctgcttgaatggcattaaagatgctttcggcggcaagcatgcctgatttcattgaagtgtgggtgcctttgattttggcagggtttagaaaacctgcatcatcacccaccagcacaccgccagcaaaggttaattttggtaagctatttagaccgcctttggttagggctcgtgcaccatatgacagacgcttaccaccttctaaaatagggcgaatgattgggtgaagcttaagacgctgaagttcgtcaaatggtgagacatatggattatggtaagacaaatcaaccaccaaaccaaagctgacttgattgtcttcggcaaaatacagccaccagccacccgtagtaccagtttctgacagtggccagcctgaaccatgcatgatgacgccttgttcgtgcttgtcggcatcaatctcccaaagctctttgagtccgatgccatagtgctgcgggtctttgtctttatccaaatgaaaacgactaatcagacgcttaccaagatgtccacgacagccttcagcaaagatggtgtatttggcaagcagttcgtagccaggctcaaagctgttttttggttcgccttgtgcatttagacccatatcacccgtcaccacaccacgcactgagccatcttcatgatataaaacatcactggctgcaaagcttgggaacatcatcacctctaagctttctgcttgctcagccagccagcgaaccacattgccaagcgatacgatataattaccatcattatgcatactgcttggtacaattgagctgggtagggcggtgctgcccttttcgctggtcaacatatacacacggtcttctttggcttctactgtgatcggtgcgtcccgctctttccagtcaggaatcagctcatcaagtgcgcgcgtttctatcacggcacctgatagggtgtgtgccccaaactctgagcctttttcgatgacgcagacggtgaactcatccattccagcagcgattgccaattggcgtaagcggattgcagcggatagaccagcaggtccaccgcccacgatgataacatcaaattccatagagtctcgttcgatttgcatgaattatccttaaaaataggtcaaatatcaaaaacaggcgagcggcaaaagcagctggcaaatcaggcggcaagattcttgccaaaatattttaataatatctattgtaacaagcttcactaattaggcaagtttttttgatgggtttgtatcgttcaatttgcgataaataatcgccaatctgctaaaaatttttgataaatttggataaaatggcttggattatgactaaataccgccataaaatccccttgtaattccctctaaaaactgccatgataaggcaaattgacaagataatttagcaaaaatcaggctaatttttgataatttggcatggttttggtcaaataataggaataaaatgatgatggataaagataatattaataataaaaacaatgacttaaataattcacttatccaaaagctgacagctatccaaaccaagcaggtcggcaagatccgtaaaattccaccattacaaagctggcagccaagacgaacgacacctttggatatcgaaatccgtgataatggtgaatggtggcatgaaggtcagaaaatgactcgtcagtcacttgtggatctatttgccagtgtgctgtgggtggagtggcatgatgatcaagccattcattatcttaaaaccccaactgacaagtatcaaattcatgtggctgacgcaccattgtttatcaatcaagtcactcaagtcacggatgctgatggtgagtggataaaatttggtacaacaaatggcgatgtcattcgcttggatgaagatcatccattatattttaagcgatttggtgatgaagaacgggtatatattgatacacgctttgggttgactgcacgcttgatgaataatgccatgtatcatttgatccaaatgggcaggcttagccaaatccaagaaaatagacagaataaaaccgtgctaaaactcagtagcggtggtaaaatctatcaaattgaacagcacggttaggcttgctgagtgctttattaaaataaaagcgtctgtgatgagcctaaagttataaggcttgcaacatgatacatccacattttgattcaacaaatccccaaaaatctgcacccatcggtatttttgattctggtgttggtggcttatcggtgtatcggcatttgtcagaacttatgcccaaagagcgatatgtttattatgcagatacccaaaatctgccttatggcaacaaatcaggcgatgagatcttgtttttgactctgcaggcggtggattggctgtgtcgtcaaggctgtaagctgattgtcatcgcatgtaacagtgcttcggcgtattcattgacaacgcttcgtatccgctgccgtatccccattgtgggcttggtgcctgcagtcaagcctgcttgtgagatgagtcaaacacgccaaattgctttacttgcgacgcaagcgacacttcaagggcaactgcttgcccaagtcattcataaggtggcaacatccaaaggtataacggtacataagcactttgagccaatgcttgtgccgtgggtcgagtcgggaatgccaatcaatcatcatgtcgctgatcttttgatcaaacaaactcaagcatggtatcagcagggcgtggatatacttgttttgggttgcacgcattacccattttttcgacaatttttgcaagattggattgatgaacaacacattacgatgaccttgcttgattcgggtgctgccattgcccaaagggttaaatctttgcttgactgttttgggataagtgctgatggtgatgtgcttgatgagccgctgacattctatgcatctgatttaacagataatgtacccgccacagcacgcagactctcacaggtgccgattagctttgttgatggcaactttttgcccatcaatgtttaatcaagcttttgcccaaagctttatccaactgtgggttttgtgtaaaatacgcttgatagatttgcaattttgattaaatttgattaaaatttggtgtaataattttaagaatttattttaagaatttaatggttaaattaaccatcaaaatggagcttgtgatgacaaccgataccaaaaaaagtgccttgcgtgaaaaaattgaacaatttgatcaattaagtgacaccatgcatgatgccgagaaaaaacgcacgctagaagagcaggtggagtatctgaaagatcaagggattgatccttcaaaaacctatgccaaatgggatgatgataaaaaagacgagtaatttttaatttgacatatcataattttatatgccatattaagataaaaagcttaacagcaaaaaaagcccaagataactcttgggcttttacttcggctatttaactaatatccaagatgagctgccatcggcattgatgacacgccgataggtcgttcctgtggtaggcggagtatttgctggcttgacaattaccgcccttgttgcattggcttgcgtgctgacagttggctgtactgagtgatactgggttgtgggcgtatttatggactgggctggtgtttgggcagattggatggaagcagtgcgaccagtaattaatcggtgaaacttttgacctgctcgaccatcgggcataacaccaacttttcgctgataatccataattgcttggcgtgtattatcaccgatgatgccatcgaccgcaccgatgtcatagccagcattgatgagtgcttgctggatttctttggattcacggcgaccgataccagggtcatctgtcggccaaggtgtggcaaagttggtattggtattttcatcacgcacaaggtcagacagctgagcgatggctaacgcatagctttctgaggcattataagaataaaaagtatcaaaattcttaccaactaagaatgcaggaccctgcctaccagcaggcagtagtaaacctgctgatgccatattatttgggataggttgtccatttggcaaggtgatgccttgagcacgccagtgattgattgattgcttattgcggcgaccacttgagccattatagccattaagacgcacttcatagccccaaggttcgcctaggcgatagcctcgcttcaccaagaaattggcagtgcttgccaatgcatcggcttttgagttgaccaaatctttacgcccatcaccatcaaaatccaccgcaagctctaaaaaggtactcggcataaactgtgtctgaccaaatgctcccgcccaagaacccgtcatatcctcagggcgaatatcaccattttggacgatttttagtgcattggcatactcaccacgaaaataactttggcgacgatcaaaacaagacaaagtcgctaggctatcaaataaattttttttacccagcgtctgaccaaaattactctcaacgccccagacgcccagtacatgctcaggcttgacgccatagcggctctcaatgcggcgtagcacatcagcttgctcatgcttggcacggataccgtcttggacacgctcactgtctaccaaagacgccaaataatcccaaacatcttttttaaattcaggctgataattgagcgagcgaatgacgctgggatcaggctgcgatgggcgatatttttcaaatgtcaccccagagacactccgaaaggtactactgttttttaaagtgctaagacactgctgaaattcactgttgctaagattggcagaatcattggaaaatgccgtttgtgatagcatgataccagacatagccagcactagggcggatgtgtgtaatttcataatattccttaaagtgttttgatgaatactgtacatcttataaccaagccaactgccttatcttttgatatatcttgcatcccaaaaaacaccgccaaatgttatgcattttgattgtcttttaataaatgtgcaaaatttgcacgcaacttggcaagcttgggcggaatggcaaaattgcaataggcttgcgtggggttattggcatagtaattttggtgatagtcctcagcggggtaaaatgttggtgcaggctcaagttttgtgaccacattgacgccttctgagcgtaacgactcaatcattgccttagcgactttggcttgttcatcatcggtataaaaaatcactgatgcgtactgcgtgccaatgtcattgccttgacggttgagcgttgttggatcatgcgtggcaaaaaataccgacaaaatcgcatcagtaccaagtattgagtcatcatagtttacttcaatgacctcaacatgacccgtctcacctgtgcagacagcttgatagtttgctgtatcacctgcaccgccagcgtaaccactgacgacagagttgatgccttttaatgaatcaaataccgactcggtgcaccaaaagcagccaccgcctaataaaatagttttcatatttttatcctcaatcaatgctctaataacaccttttcaagtctatcataagtcatgccaaataccaaccacgatactcacgatactttatttaccacaccgcttgataagtcggctcgctttagttttgatgaagaagtggtggcgtgttttcctgatatgattcgccgtagtgtgccaggctatgggcaagtgcttgcgatgctgccgattttggcacgccgccattgtttgttgcgtcaagttagtgatcgtggagcgcgtgtgagtcgtgtctatgacttaggaacatcgcttggggcggtgagctttgctttggcggataaatttgctcctgatgagcttgagattcatgccatcgatatctcagcaccaatgattgagcgggccaaatcggtcgtaggtgagtattatcctgatcatgatattcgcttttggttggatgatgtttgtcaagtggatttgttaccctgtgatttgattattattaatctaaccttacaatttttaccaccagatcagcgactgttattactccaaaaatgccatcacgctttggcagaaggcggtattttgattttgaccgaaaaaactcacctaaccgatgaacaagacgatgcgtggcgagttgagcggtattatgattttaagcgtgccaatggctacagtgatatggaaatcagcggtaagcgtaacgcacttgaaaatgtgctcatcaccgacacgctacacaagcaccatgaacgcttggcacaggcaggttttgagcgtagcttgacttggtttatgtttttaaattttgcgtccattgtggcttttaaatgatgataaattaatcatcagttaccaagtttttagtaccaaattttgcccaatgatgaagaccgatgaccttatgaatacaatcactcgtgccgaaaaagacctttatcaaaccttatttgacctagctcagcatcatccgatggcgtatgaatggctcaaattattaccagattggttagcgaacattaaaaataaagatcgatatgcacatgcgccatattatgaatcaatcattgataaactgcctgatgttacgcctaatgaaattaatctaaatgccgcttgtattacttcgcagattgactttactcacagcgattatcgttgtagtgaagctttgttaaaaaatctcatgccatggcgaaaaggtggatttaaatttgggcaaggcgatcggctgatccatattgatacagaatggcgtagcgatttaaaatgggacagaatattaccatacattggcgacttgactggtaagcgagtgttggatgttggcggaggttcgggctatcatggttttcgtatggttggggcgggggcgagtacggtgattgtcatcgatccgtcttgcttattttaccatcagtttatggcgacccggcactttcttggcaacataaaaaaccgctatgagcagtcgcccattcattttattcctgtgggcttagaggagctgccccaagataataatcagtcaggattatttcacagtgttttttgtatgggtgtattatatcaccgtgcatcaccgtttgattgtttattacaattaaaaaatcagctgacaaaaggcggtgagctgatacttgagactttggtggtggatggtgatgaaaatacggtacttgttcccaaaaatcgctatgcgatgatgaataatgtgtattttttaccatcggtatctgccttacagctgtggctagacaaaataggctttgctcaggttcgctgtgttgatattaatatcacaaccaatgatgaacagcgaaccactgagtggatgacctatcattctttagatgattttttggataccaaagatccttcaaaaactgccgagggatatcctagacctaagcgtgcggtgataattgccaaaaaaccatcatgaataagtctgactgaagtataatattacaatactggctaatcgcttgacatgatttgtgaggcatttaataaaaaggtgaaactatggcaggtggtagtttattaatgctgcttgatgacatcgcagcgatactcgatgatgtctcggtaatgactaaggtggcagccaaaaaaaccgcaggtgttttaggtgatgatttggcactaaatgctcagcaggttactggcgtgcgtgctgatcgagagttggctgtggtgtggggggttgctaaaggatcgttgattaataaactgattttggtgcctgctgcattacttatcagtgccatcgcagcttggctaatcacgcctttattgatgcttggtggtgcttttttgtgctatgaaggtgctgaaaaggtagttcataaatttacccccaatctactaccacacgagatggatgatgaaatggcacataccaaaagactcaaagctaatgctgatgaaagcatcgatttggccgcctttgaaaaagataaaattcgtggtgctattcggacggattttattttatccgctgagattgtggtgatttcattgggtgtaatgacggcagcgactttcacaacaaaagcggcagcattatctgccattgctattatgatgacagttggggtgtatggcttggttgccttaattgtcaaactcgatgatatgggtatttatttggttaatcagccctcggcataccgccaagcgatgggtcgtactattttggtatttgccccaaggcttatgaaatttttatcctttgcaggcacgcttgccatgttcttggtcggtggtgggattttggtgcatggtgttggtatcttacatcatcaagctcaagacttggcggcgttatcgggtgtttttggtggtctgaccgaagctttatataatggtatgacaggtttgattgcaggtttgatgattttggtgggtgtgatcggtgttaaaaaattcataaaacaatagccaaatttattgaacctaagctatcaataaaaagtgttcaatcaatatggacgctttttattttggcatgatgaaatgatgatagttatttgggttatttgggttatttgggttatttgggttatttgggagtaggacgctgttcgataagcaaagagtcaataccattattacgcaggcgtacactggtggcagaggcttctttttgagtcatgggcgttgagataacttgatacacatagccattttttgtatcttggcgtaccacaatggcatccacacctgccatgagtacttcagcacgctttagatcggcatctttggccttttcatagcttttgatttggagtatgtattggctttggtgattaggctcatcatcagcggtattttctgcgacgattgaaatgtcagctggctggtcggtactcgcttttgtgctgtgattgatgatcacatcggttgatggcttgggcaaggtattatcttctcggtcttggatgctcacgccttctggaatgctttgaaatttttgttcgggcagaacttcataaaattcaaattcaatttcaggttcgctggcggtaatgggtttaaccaaagcgtcaggtttaggatctgcgctttgaccaaaaccatcaaataaaggcgacacatacaaaaaaaccgccagcatcgctaccaccaatagccccacgacaatccaaagcaagctacttaaacctactctttgattatgtacttcatctttatagacggcagaaggctgtttttggggtctttgagccataagaatatcctgtatggtttttatacaaacattagggtagtaatcaaataccaaattaaggtgagcgttaattagcccaagcgacggctattttagcaaatttttataaaaatatcgtgcttatttttacctgatggttggtagttgggataaatattgctataatgtgcggataaataatcataaaggtgcttggtatgtctgcaatggcgacgctgtttttggtatcggctgagacgattaccacattgggtctgtatgttttatt

SEQ ID NO: 30 - DNA, 58909 bp, Moraxella catarrhalis
ccgtattgattgtctttagtatcgtatttatggtactctcacaagtctttggtctgggcaatgtccatggttcaggcgggctaaactatgtcagcttggcggtgatgtgtttgttatacggtatgattggctcagtcatttcgttgtttttgtccaagtggatggctaaaaaatcaacaggtaccgtggtgattgataccccaaaaaatggtacagagcaatggttggtggatatggttgcccgtcaagcgcgtgaagttggcattggcatgcctgaggtgggtatttttgataatgcccagcccaacgcatttgctactggctggaataaaaataaggcattagttgcagtatcgacagggctgatccatacgatgacacctgatgaagtcgaagcggtgcttgcacacgaaattggccatgttgccaatggtgatatggtgactttggcactgattcaaggtgtggtcaatgcctttgtgatgttctttgcgcgtatcattggtaattttgtggatcgtgcgatctttaaaaatgaaagcagctcacctggcattgcctattttgtcaccagcatggtgatggatattttgcttgggattttggcatctgcgattgtcatgtggttttctagattgcgtgaatatcgtgctgatgaaatgggtgcgcgtttggctggtcgtgataagatgatcagtgcactcaatgccttgcgtcctgctgaggcacgcccagatcagatgcctgaagcaatgaaagcatttgcgattgcaagtggtcaatctcaaggttttagcattgccagcttatttcgctcacatcccactttagatgatcgtatcgcttcattgcaaaaatttcatggttaatctttactagctattttataatcaaaaaaagactgcttgattgagcagtctttttttgattataaacaaaagggattaagctgatcgtctgacttatcatcatgttgcttaagcacttcttcaaatggctcaagtgcaggctctaagcttgcagcttcgtttggtggtagcacttgtttgggattgagtgcatattgaccaaggagctgagtcagcttagcaggcgacagctgtacgcttaggatttgatggcccaattcatcaaagctttctgactcaatgacgccaagctcatgcaaggtattttttagggcgcctgcatggtgaggtaaggtcagcgtataatggtttagctgtcctgataaaagttcttggactgctaacatcagctggtttatgcccaaattttctttggcagacacatagacccgatgtggcacgccatggtcttgataatgtattttggcaggttcaccacttttgtcaattttattaaataccaataaaatcggcgcatctgcctgtatttgctcaagcacatcattgaccgcctcgatttgagcgtgcatatcctcgctggcggcatcaatcacatgcagcaacaaatccgcctcaagcgtctcctctagtgtcgcatgaaagctttctaccagctcatgtggcaaatggcgtacaaatcctaccgtatctgccagtaccacattaccgacacctggccatttgacacgccgtagtgttgggtcaagggtcgcaaaaagttgatcggcagcatagatattatcgtcagttaagcggttaaatagcgttgatttgcctgcattggtatagccgaccaatgatatggttggaatgtctgatttttggcgtttagcacgaccttgtttacgggtttgtttgaccttatcaagcttggctttgagctgtgtcacccgaatctggagcaatcggcgatccgtttctaactgagtttcaccaggaccacgcaggccaataccacctttttggcgttctagatgcgtccagccacgcacaaggcgtgtggcaaggtgattgagttgtgcaagctcaacttgtaacttaccttcatgcgtgcgtgcacgctgtgcaaagatatccaaaatcagccccgtgcggtcaagcacacggcatttgatcaatgattctaagtttcgctcctgacttggcgtgagtgtgtgattaaaaatcacaataacatcatctgtattatcgtcattggtatcacgaaaacgcttgactgcttcagcgatttcttcggctttgcctgtaccaacaaagtatttggcatgtggcttactgcgactgcctgtgatgatttctatttcgtttgcacctgctgaatgtactaacaagcgaaattcttctaggtcatcaggatcggtgatttgatgaatgtctaagtgaaccaaaatggcattttctccgccttcgtgtctgtcaaaatattgcaatacgaatccttaaaattaatatgtaaaatgctttaatggggattacctacccaaaaaatcaagttatggtatgataaggtatttgaaagcttgagtgtattttatgtcttattctatgaccaaatccattcgccaccgtaataaagtcatgacttttgatgtgccaaaggtgatgggcgtacttaatatgacaccagattcattttcagatggggggcgttttaaccatttggatgctgctttggttcacgccgagcagatgatcgcctatggtgttgatatcattgatattggtggagaatccacacgcccccatgccccaaaggttagtactgatgaagagcttgagcgtgtgatacccatcatcgccgctattcgtgaaaattttggtgaagatttgtggctttctgtggataccagtgaccctgcggtgatgcttcaggcaattggtgcaggtgccgacattgtcaatgatgtgcgtggtctaagccgagagggcgcttgtgatatggtggctgatcttgagtgtcctgtggtcatcatgcacagccgtggtacgcctgataccatgactcagacgatgaatgagttgacaagttataacgatgtgcttgctgagattagcactgagcttcaaataagaattgataaggcgatggacgcaggcattaggcaagaaaaaattatcattgatattggtatgggattttcaaaaaattatgaacatcacattcaaattatgcaaaatttacagcaaatcattcagcattttcagatgcctatgttgtttggcgtatcccgcaagcgatttttgggtgaggttttaaccaatagcggacttgagtatcttaaaaatcatcaaccgattgagagagataatttggggacgcttgcacattttatcgcactacagcaaggcgtgcatattgtgcgtgtacatgatgttaagccgatggcacaagccgtgcgactgtggcaggcgttatacggctaattaaagtggtgattggttgaggctagccaaaagtgtcaatgcactcaaggcgaccacgggcgcagtttctgtacgaagcacacgctcgccaatctgccatggcacaaaaccatgatgaatcgccaaatcaatctcccttgggcttaagccgccttcggcaccgatcaacaggctgatattttttggtacaagtttgttaaaagtagggttattttcactaagtgcaagtaccagtttcagttcatcttgacaattggccacccattcatcaagtaagatgggtgcgataatgtttggaatgatattcataccgcactgctcacaagcagcgacggcaacactttgccaatgtgtgagtttcttaaaatctctgtcgtatttgaggtgggcttggcaacggtcgctggtcaatagatgaatacaatgaacgcccatttcggtggctttttgtatggcataatccatacgatcaccacggctcatcaccaagccgatactggcacgaaacggtggcgtacggttgatggggtgataggcgtcaatcttgacgctggcagattttttatgaatatgtgtcagcgttactgtgtactcaccgcccatcccatcaaataaaaaggcacaatcaccaaccgaagcgcgcagcaccttgcaccaatgatgtgtgacatgatcaggcagggcgatgatttgtccaatcaggttggtggtgagcggtgtatcaacaaaaaatcttggcatatttgaccggttaaatgacttaaattaaacccaaatcagcgaccaatgtcgtattgggcttggtgtgagtgatatgcttaataataaggcaggcatgctttttgccaagcaatcagtaaatatacctagcgatcagaatgataaaaaactgtgctatgcgatatcctaaaagatggctaaaacttgctattatagcaagatttaatcaatttgaataaaattatcgcagctttttgaatgatttggcgtcattttaagtaaaaaaatggcacaagcctaaactgtgccattttttatattaattaataattaaggttgggcaggcttaatgagtggcaataacgccccgtagccttgtttttccatgtccgctttggggatgaattttaatgcatcgccattgatgcagtaacgcagtccgccccgtgcctttggaccatcagggaacacatgccccaaatgtgaattggcaatgcgtgagcgtacctcggtgcgtatcatattatagcttgtgtcggtatgctcgctgatgacttgtggatcaatcggcttggtaaagcttggccagccacagcctgagttgtatttatcggtagataaaaacagtggctcaccgctgacaatgtctacatacagcccatcatcaaacagatggtcgtaggcatggctaaatgcccgctccgtgcctgcgttttgggtgatatcatattgagccttggttaagctttgttttaaattatctttagtaaaagcttggtagcgtcttgggtcaagggcctcttgaacggtgcttgcctttggtagggtgggagctttactcgtgattttatcattggcaagacttagatccacatgacagtagccatttgggtttttggtgagataatcttggtgatactcttcagcaggggaaaaatgccttagaggtagattttcgacgacgatgggtgctttatatttttgttgtaattcatttaaagcattctcaataatcgctttgtcgcttggatcggtataataaacgcctgtgcgatactgtatgccacggtcatgaccttgtttattgacgctggttgggtcaacaatcctaaaataatattgtaatagagtgtccaaatccaccttatcggcatcataaaccactttgacggtctcggcgtgtcctgagcctgcaatgacttgctcatagcttggattggcgattgtttcattgccattggcataaccactgacagcatctaccacgccatcgatacgctcaaagtaagcttctacaccccaaaaacagccgcccgccagatggatggttttggtatttaaaggctggccttgatcgttataatatacaccatctttatttttggtgggcatggcggtctgcccaccttgggctttaagctggtctagctcttgtggattttttgccaaataagacacttgctcaaagctaagattgcctttattaagatacacaagttgcccatttttgtccaagattgcccagctggggtagacctgtacaccaagttctttaatgagttggccgctactgtcaatgagcacgggcagatttggataatctgcttgtagcacttgataccagtcggtaaaatcttgggtatttttttcgtttaagtgagtggggctggcaacggtaatgatgttaaagcctgccaaattagggtcatcacgccagtcatgcgtttcttgtaaggtggctaaacacaaagggcaccagcttgcccaaaacttcaccaaagttggcttatttgggtcaatgacgcttttgcctgtgtcgcccaaaccttgggtaagctggggcagggcggataattgtgccaaggtgttgctaggtaacatattttggtgcgttatggatggtgtatgaattttgctgggtttaccgcaagcagagagcatagttaggctagcaaatataccaaaactgatggcaaagatatgtgatcgtaagcgtggctttgtcataaaagctccttgttggattgttgattgataagacgcttttgatgtgatgaaccttaaaatcagtcatcaaagctgattttatcatcttgtgatttggatgtcattacttaaatgatgcgactatgccaattatatcatagattattggggcttttggtgagatgtgggtgatttggtcttaatctgtcaaggtaattatgagtaaacatatcctgatgacataacaaaagcggtaatagatttaccgcttttgtctgatgaatttatcatataatactgattaatacttataatcttctgctttaaacgggccatctatcggcacaccgatgtagtccgcttgggtttgggtgagcttggtgatgaccccattaaatcctgccaccatggcggcagcgacctcttcatcaagctttttaggcaggactttgacatacaggctgtctgcttttttgtccactggcaaattggcaaatttttgttgatacagatacatctgtgctagcacttgattggcaaaagagccgtccattaccctagagggatgccctgtggcattgcccaaatttaccaaccgaccttcagacaacaccagcaaataatcacgctcatcatcagagcggtagacttgatgcacttgtggtttgacttcaacccatcgccagttatcacgcataaagttggtgtcaatctcggtatcaaagtgtccgatattacagaccaccgccccagatttcagggcggttaacatgtcgctgttgcagacatgataattgcctgtggtggtcacgataaggtcggtgtcttgtaagagcgtagtgttcacgccttgacttggctcaccattgataaaaggcgaaaccaattcataaccgtccatacacgcttgcatggcacagatggggtcaatttcgctgactcgcacaatcatgccttcttgacgcaggctttgggctgagcctttgcccacatcaccatagccgatgactaaggcacggcgaccagccagtagcatgtcggtggcacgcttgatggcatcgttcagactgtggcgacagcgtatttgttgtcgtttttggatttggtgatggcatcattgacattgatggcagggactttgagtgtgcctttattcagcatgtccagcagacgatgcacgcctgtggtggtctcttcactgatgccatgaatgcccttgagcatctgtggatagtcattgtggataagggcagtcaaatcgccaccatcatctaagatgaggttggcatcccaaagtttgccctgattttgagagccactgccatcatgaatttgttggcgtaaacaccactcgtattcttcttcggtttcccctttccatgcaaacacagggataccagcggccgccatggcagcggcggcgtggtcttgggtgctaaaaatattgcatgatgtccagcgaacttctgcacccaaggcaaccaaagtctcaatcagcaccgctgtttgaatggtcatgtggatacagcctaggattttagcacccttaagtggttgctggtcttgatagcgttttcttaaccccatcagggctggcatctcagcttctgccaaggcaatctcacggcgaccataatcggctaaacggatatcagcgactttataatcggtgaagttttgggtggtacttggattgattgaggtaggcatatctttattcctaagctattttaaagtatttttaacaataattttgatgaatttgagataattgatgctaaaaggttgaatgaccaaaccatcgctaacaatcaagaaaagacattttaagcataaaaagcaaatgtgtcttgatggcttattataacagttattatgataaatttgggtagaaagttaaatggatcgttgggtaagtttgttggctatccttaattaattataattttttaataatgcttttactttattttaaaaatagagtaaaaaatggttggctttgggtttttatctcactatggtagataaaattgatacaaaatggtttgtattatcacttgtatttgtattataattttacttatttttacaaactatacactaaaatcaaaaattaatcactttggttgggtggttttagcaagcaaatggttattttggtaaacaattaagttcttaaaaacgatacacgctcataaacagatggtttttggcatctgcaatttgatgcctgccttgtgattggttggggtgtatcggtgtatcaaagtgcaaaagccaacaggtggtcattgatgaatcaatcaaaacaaaacaacaaatccaaaaaatccaaacaagtattaaaacttagtgccttatctttgggtctgcttaacatcacgcaggtggcactggcaaacacaacggccgataaggcggaggcaacagataagacaaaccttgttgttgtcttggatgaaactgttgtaacagcgaagaaaaacgcccgtaaagccaacgaagttacagggcttggtaaggtggtcaaaactgccgagaccatcaataaagaacaagtgctaaacattcgagacttaacacgctatgaccctggcattgctgtggttgagcaaggtcgtggggcaagctcaggctattctattcgtggtatggataaaaatcgtgtggcggtattggttgatggcatcaatcaagcccagcactatgccctacaaggccctgtggcaggcaaaaattatgccgcaggtggggcaatcaacgaaatagaatacgaaaatgtccgctccgttgagattagtaaaggtgcaaattcaagtgaatacggctctggggcattatctggctctgtggcatttgttaccaaaaccgccgatgacatcatcaaagatggtaaagattggggcgtgcagaccaaaaccgcctatgccagtaaaaataacgcatgggttaattctgtggcagcagcaggcaaggcaggttcttttagcggtcttatcatctacaccgaccgccgtggtcaagaatacaaggcacatgatgatgcctatcagggtagccaaagttttgatagagcggtggcaaccactgacccaaataacccaaaatttttaatagcaaatgaatgtgccaatggtaattatgaggcgtgtgctgctggcggtcaaaccaaacttcaagctaagccaaccaatgtgcgtgataaggtcaatgtcaaagattatacaggtcctaaccgccttatcccaaacccactcacccaagacagcaaatccttactgcttcgcccaggttatcagctaaacgataagcactatgtcggtggtgtgtatgaaatcaccaaacaaaactacgccatgcaagataaaaccgtgcctgcttatctgacggttcatgacattgaaaaatcaaggctcagcaaccatggccaagccaatggctattatcaaggcaataatcttggtgaacgcattcgtgatgccattggggcaaattcaggttatggcatcaactatgctcatggcgtattttatgatgaaaaacaccaaaaagaccgcctagggcttgaatatgtttatgacagcaaaggtgaaaataaatggtttgatgatgtgcgtgtgtcttatgataagcaagacattacgctacgcagccagctgaccaacacgcactgttcaacctatccgcacattgacaaaaattgtacgcctgatgtcaataaacctttttcggtaaaagaggtggataacaatgcctacaaagaacagcacaatttaatcaaagccgtctttaacaaaaaaatggcgttgggcagtacgcatcatcacatcaacctgcaagttggctatgataaattcaattcaagcctgagccgtgaagattatcgtttggcaacccatcagtcttatcaaaaacttgattacaccccaccaagtaaccctttgccagataagtttaagcccattttaggttcaaacaacaaacccatttgccttgatgcttatggttatggtcatgaccatccacaggcttgtaacgccaaaaacagcacttatcaaaattttgccatcaaaaaaggcatagagcaatacaaccaaaaaaccaataccgataagattgattatcaagccatcattgaccaatatgataaacaaaaccccaacagcaccctaaaaccctttgagaaaatcaaacaaagtttggggcaagaaaaatacgacgagatagacagactgggctttaatgcttataaagatttacgcaacgaatgggcgggttggactaatgacaacagccaacaaaacgccaataaaggcacggataatatctatcagccaaatcaagcaactgtggtcaaagatgacaaatgtaaatatagcgagaccaacagctatgctgattgctcaaccactcgccacatcagcggtgataattatttcatcgctttaaaagacaacatgaccatcaataaatatgttgatttggggctgggtgctcgctatgacagaatcaaacacaaatctgatgtgcctttggtagacaacagtgccagcaaccagctgtcttggaattttggcgtggtcgtcaagcccaccaattggctggacatcgcttatagaagctcgcaaggctttcgcatgccaagtttttctgaaatgtatggcgaacgctttggcgtaaccatcggtaaaggcacgcaacatggctgtaagggtctttattacatttgtcagcagactgtccatcaaaccaagctaaaacctgaaaaatcctttaaccaagaaatcggagcgactttacataaccacttaggcagtcttgaggttagttattttaaaaatcgctataccgatttgattgttggtaaaagtgaagagattagaaccctaacccaaggtgataatgcaggcaaacagcgtggtaaaggtgatttgggctttcataatggacaagatgctgatttgacaggcattaacattcttggcagacttgacctaaacgctgtcaatagtcgccttccctatggattatactcaacactggcttataacaaagttgatgttaaaggaaaaaccttaaacccaactttggcaggaacaaacatactgtttgatgccattcagccatctcgttatgtggtggggcttggctatgatgccccaagccaaaaatggggagcaaacgccatatttacccattctgatgccaaaaatccaagcgagcttttggcagataagaacttaggtaatggcaacattcaaacaaaacaagccaccaaagcaaaatccacgccgtggcaaacacttgatttgtcaggttatgtaaacataaaagataattttaccttgcgtgctggcgtgtacaatgtatttaatacctattacaccacttgggaggctttacgccaaacagcagaaggggcggtcaatcagcatacaggactgagccaagataagcattatggtcgctatgccgctcctggacgcaattaccaattggcacttgaaatgaagttttaaccagtggctttgatgtgattttggcatgccaaatcccaatcaaccaatgaataaagcccccattaccatgagggctttattttatcatcgctgagtatgctcttagcggtcatcactcagattagtcattaatttattagcgattaatttattagtaatcacgctgctctttgatgattttaagtgatgggtattcaagaacgatgtcatactcagcaccgtttttataggcttctacttcaaagacaggcttgcctaaaaagtcatcaacttctatatcgccgacttgatagccacgagcagcaagcatttgaatggctttttgacgattttgggcaaagttactgtcgccataagcttgtgctttaatacggtcgttagcaactgcggtggtagagataccaacgacaggcaacaaaacagcagcacttagcacaccagccaacagtttattggttaaatttttcatagtagtttcctaattattatcattgtaattcatgtttatcgttataaacaatcgttataaataactgtgtcgtgataaccattaatcacaagtgggttaaatgccttttgcccaatggcaaataggcacaatgctctgcttgttctatgatggtctattatgatcatcattttattgacctatttttttaatcgtaatgtttgtttgatgttagtataaattttatcaatcaaacaatcacaaattatatcaatcatagacggtaaacaggcttcatattttacgcatatttccccagatgtctgtagtgtttcatagatgatttgtaaaacaattgtcggtcattattatcaattgtaaactgatggctaatttgtaaccttatggctaatgataatatgaataaagcgttatactgtatcaaataatgagtaaaaaccatcaatggcatcttatttatcatcaggttgtgttaatcagatgccaattaagcgactaattttgtaaattaattaataatcattcatatttgtatttttaaataccataaaaaatggtaaaatatgctcgcttttttgataggagctgtcatgacaatcacgcctgtttataccacattcacccccaccaaaacacccataaaattttttatggctggcttgacttttctaatcgctcatatcagccatgccgatgatggtcgcaccgacaatcaagagccaatcaatcaagaaatagccacccttgaacccatcattaaccatgctcagcctgagttattgtcccatggtgcattaacaccaaaaacagaaccaatactggcacaaacaccaaattctgccgaagatacgctcatcgccgatgaggcgttactgcttgataaccctgatttgctcaatcacgccctaaattctgctgtcatgaccaaccatatggcaggcgttcacgcattattgcccatttatcaaaaactgcccaaagaccatcaaaatggcattttacttgggtatgccaatgccttggctgctttggataagggcaacgccaaaaaagccattgatgagctgcgtcgcatcatcgccatcatgcctgaatataatgtggtgcgttttcatctggcaagggcattatttatggacaaacaaaatgaagccgcccttgaccagtttaataaattacatgctgacaacttgccagaggaggtgcggcaggttgttgggcagtacagacaagcgttaaaacaacgagattcatggacatggcaagtaggcatgaatctggccaaagaagacaacatcaatcaaacccccaaaaacaccacgcaaggtcaatggacttttgacaaacccattgacgccatcaccctaagctatcaattgggggcggataaaaagtggtctttgcccaaaggggcatatgtgggagcgaacacccaaatctatggcaaacatcatcaaaatcacaaaaaatacaacgaccattggggcagactgggggcaaatttgggctttgctgatgccaaaaaagaccttagcattgagacctatggtgaaaaaagattttatgggcatgagcgttataccgacaccatcggcatacgcatgtcggttgattatagaatcaacccaaaatttcaaagcctaaacgccatagacatatcacgcctaaccaaccatcggacgcccagggctgacagtaataacactttatacagcacatcattgatttattacccaaatgccacacgctattatcttttgggggcagacttttatgatgaaaaagtgccacaagacccatctgacagctatgagcgtcgtggcatacgcacagcgtgggggcaagaatgggcgggtggtctttcaagccgtgcccaaatcagcatcaacaaacgccattaccaaggggcaaacctaaccagtggcggacaaattcgccatgataaacagatgcaagcgtctttatcgctttggcacagagacattcacaaatggggcatcacgccacggctgaccatcagtacaaacatcaataaaagcaatgacatcaaggcaaattatcacaaaaatcaaatgtttgttgagtttagtcgcattttttgatgggataagcacgccctacttttgtttttgtaaaaaaatgtgccatcatagacaatatcaagaaaaaatcaagaaaaaaagattacaaatttaatgataattgttattgtttatgttattatttatcaatgtaaatttgccgtattttgtccatcacaaacgcatttatcatcaatgcccagacaaatacgccaaatgcacattgtcaacatgccaaaataggcattaacagacttttttagataataccatcaacccatcagaggattattttatgaaacacattcctttaaccacactgtgtgtggcaatctctgccgtcttattaaccgcttgtggtggcagtggtggttcaaatccacctgcccctacgcccattccaaatgctagcggttcaggtaatactggcaacactggtaatgctggcggtactgataatacagccaatgcaggtaatacaggcggtacaagctctggtacaggcagtgccaacacaccagaaccaaaatatcaagatgtgccaaccgataaaaatgaaaaagaacaagtttcacccattcaagaacctgccatgggttatggcatggctttgagtaaaattaatctatatgacccacaaaacacgccattgaatgaaaataatatcattaccttagacggtaaaaaacaagttgctgaaaatcaaaaatcaccattaccattttcgttagatgtagaaaataaattgcttgatggctatatagcaaaaatgaatgtagcggataaaaatgccattggtgacagaattaagaaaggtaataaagaaatctccgatgaagaacttgccaaacaaatcaaagaaaatgtgcgtaaaagccctaattttcagcaagtattatcatcaatacaagcgaaaactttccattcaaatgaccaaacaaccaaagcaaccacacgagatttaaaatatgttgattatggttactacttggtgaatgatgccgattatctaaccgtcaaaacagacaagccaaaactttggaattcaggccctgtgggcggtgtgttttataatggctcaacgaccgccaaagagctgcccacacaagatgcggtcaaatataaaggacattgggactttatgaccgatgttgccaacaaaagaaaccgatttagcgaagtgaaagaaaaccctcaagcaggccggtggtatggggcatcttcaaaagatgaatacaaccgcttattaactaaagaagactctgcccctgataattatagcggtgaatatggtcatagcagtgaatttactgttaattttaaggaaaaaaaattaacaggtgggctgtttagtaacctacaagacagccataaacaagcagtaaccaaaaccaaacgctacgatattaaggctgatatccacggcaaccgcttccgtggcagtgccactgcacatgataaaaatgatgcaagcaaaaccaaacacccctttaccagtgatgccaacgataagctagagggtggtttttatggaccaaaaggcgaggagctggcaggtaaattcttaaccgatgacaacaaactctttggtgtctttggtgctaaacaagagggtgaagctaagccaaccgaagccatcttagatgcctatgcacttgggacatttaacacaaatgacgcaaccacattcaccccatttaccaaaaaacaactggataactttggtaatgccaaaaagttggtcttaggttctaccgtcattgatttggtgcctaccgatgccaccaaagatgtcaatgaattcaccaaaaacaagccagattctgccacaaacaaagcgggcgagactttgatggtgaatgatgaagttatcgtcaaaacctatggcaaaaactttgaatacctaaaatttggtgagcttagtgtcggtgatagccatagcgtctttttacaaggcgaacgcaccgctaccacaggcgagaaagccgtaccaaccacaggcacagccaaatatttggggaactgggtaggatacatcacaggaaaggacacaggagcgggcacaggaaaaagctttaccgatgcccaagatgttgctgattttgacattgactttggggaaaaaacagttaaaggcaaacttatcaccaaagaccgcacagatcctgtctttaacatcacaggtaacatctcaggcaatggctggacaggcaaagccagcaccgccgaagcgaacgcagggggctacaagatagattctagcagtacaggcaaatccatcgtcatcaaagatgccgaagttactgggggcttttatggtccaaatgcaaacgagatgggtgggtcatttacacacaacgctgatgacagcaaagtttctgtggtctttggcacaaaaagacaagaagtcaaaccatgatttaaacacaatgtttgtttggctgatgggattgacgcttaatcaaatatgaatgattaagatgataaacccaagccatgccaatgattgatagcaatgatggcggatgatgagtgttcattatctgccattattattgcttgtcatttggtggtgttatcacattaatcattaaaattaacataataaatgattaaatgatatttaatgaaagtcagggttattttggtcatggtttttcatgattatttaacttataatgcgttatggttagcaaaaagctaagtctgtcaataaagctatggtgagtgattgtgcaaaagatggtcaaaaaaatcggtatggtgctgtcaggcgtggtgatggttctgttaatgataataacaacgccaagccatgctactgccaagttgttgccgacctctcaagaaaatccaaccaaaactatggtagatagctttggtcgtgaaacgccacgaggggcagttcaggggctattgcgtgcaattgcagcagaagattatgaactggctgccaactatttggacggccgttatttggcaaaaacccaaacgcccaatcgtgagattgttgagcatttggtggttgcattagatgcaggtggcaagctgtatccagatttacaaatcagtcatgccagcgaaggcgatttgtcggataatttgccaagtgatattgataaagttggcgagcttcatctgatgaatgagcatattgacattttgctcaatcgccgtgtgactgatgatgacatggtattttggcaagtgtcatcacagaccttgtcatcattgcccaagatgaccacacacgcccaaacgctttcagaacggcttgggctgtctgatgataccacacacgctcaaaccaaatattggcttgagctttcagcattggtgctgcttgtgacggttttatatttggcgattaatttggcggtatggattttgtattgggtgagtaaggggctttataccacactcaccaaaaagccttttcgcattatgcccagtgtgattatgccgttgtctttggtggttttatcattaatcttaccgataattatgatcagtgttggcgtgcctttgacattgcgaagttcatttggtcggattaaggatattgtcgcttggggtgcgaccgcttggctgatgcttcgtctgcttgatggtatttttcgccgtgctgaggcaaattcattaaaacgaggtcgccctgaacaggtttctattttaaatttattaagaaaagttgccaaagccttgatgattattttggcggttattttaatttttggtaatcttgggtttgatttaaccacaggcatcgccgcactgggggtgggtggtttggcactggcttttggtgcccaaaaaacgcttgaaaatctcatcggttcggttgtggtggttgccgaccgccctgtgtatgtaggggattattgtaaatttggtacttatgaaggcacggtgattgatattggcattcgctcaactcgtatccgcaccttaaaccgcacaattgtgactgtgccaaatggcgaattttcatcgctacagattgaaaactttactgcaagggatatgttttattttttgcatgatttattcatcaagcgtaccgctgatttggcggaaattgagcgaatgataaccaatttacaagaatttttggcagcgcatcggctgaccaaccatgaatggaatcaagtttggattaagcagttgcgtcaagagtgttatgtcattgagatgcgtgcttatattgatgctgatggtgctcaagatttttatgccaaacaatcggtactgattttggagatattaaaatttttagaaagttatcatattgaacatgctttaccatcacaatccattacagtgcatcaaaatcatgaccaaacaaccccaaagcatgaaaaaacccccaagacatgataaaatacgccccaattagcatcacttaggttaccaaagtgattaaccaatacttatcaagggcaaatcatgtatacagacagtcatgcacatttgacttatctaaagcttgaccattatgataacagacctgaaaatctgctcaaagccatgtaccaagcaggcgtgaggcgtaccatggcaatcatgtgccagttgtctgaatatgacgatattcatgcttgggttgagatgtcagcagatgccatgcctgatattggtatgagtgtcggtgttcacccttgccaagatgaacatacgctggctgccatcagtcctgatgaactgctaaagcgtgatcatgaaaaagtttgggcatttggtgagacagggctggattattattgggataaggataaatcatctgcccaaaaacacagttttgctgcacacattgacgcagcaaagaccgctaaaaagcccattattgtacatactcgcagtgcttatcaggatactttagaggtgctggcagctgagcggtgcgaacatggcattattcattgctttaccgaagattatgcctttgccaagcgtgcattggatatggggctgtatatttcattttcgggcattttaagctttaataaatcacaagacctaagagaggtcgctgccaaattacctttagatagggtacttattgagaccgatagcccatatttggcacctgttcctaagcgtggccgtgataatgaaccaacctttgtgccatatgtggcggaagctttggcaaagatttatcaaaaatctgccgaagagattggccacatcaccagtcacaattttatcactttggtcaatcaatataaacctattatccaatcacgcttatgatgacaaataaacgcatcagccttgccccaatgattgattataccaccatggattttcgggcatttgcaaggctttttaacccaaatatccatctttatactgaaatgattagcaccagtgccatcttaaaaggtgatgccaagcatcatcttcggtgtcatccgaccgagtcgcctgttgtgttgcagttgggtggctcaaatccagacgagatggctaaagcggttcgtgtaaccgaagcacttggttttggatattgtgaatataatatcaatgtcggttgcccctcagatagggtgcagcacaataaaatcggtgcatgtttaatggcagaaccgcagatcgtggctgatatggtgcgtgccatgaaaaatgaaaccgacaaaccgattaccgttaagcatcgcattggtattgatgactgtgatagctatgaatttatgcgtgattttgtgcagacggtggcagaggcaggttgcacgcattttattacccatgctcgcattgcttggcttcaaggattatcacccaaacaaaaccgagaaattccgccattacgatatgaagaggtttatcggctgaaacaagatttccccgatttgaccatcgagattaacggtggcattagccatttggatgatattaagacgcagttggcaaaggtcgatggcgtgatgattgggcgagcattttatcacaatccgtatttgatggcagagtgtcatcttttatggggcagtcagccacccagtcatcgccaaatttttgaaaatttaatcagctatctaaaaaagcgtgctgatgaaggtgtgaatcttgcggtattgacacgccattatttggggttatttcaaggcatggcaggcgcgagacgctggcgtcaagatctaagcggtaagtctgttttgacggtcgatgagatttatcagtcaggcgatcgagttttatcccaaaatggtcaataggttcatcgctgccagattggcttatgaaaaaatcatcaaaagcagcactaagctattgttgatactgtgaagtagcatcggtgcaaaaattgattgtgtagacagccgtgtatagcaaagtattaatgacagtgtcgccatcatcacaaggtcaatatagttgtattgaaaatgcaaaaaagaaaaaataccgctggataataagctaacagcgatatttgtgtgtcgctcttgggtgaaaaaggggctaaaaatatcctcacccaatcgccaaaatagcccacgacaaatcagctcttcatagattggggcacaaatcagaaccaacagtgcaaataaccacatgggcgtgctgtcatcaaccaaacttttgacatcaattgatggcatgggttttagccaatcgcttagtatggcaacaaacccacttgataagatgataccaaccaataaaaccgccaaagctttaaaaaatgcctttgaattcatggcatgaaagccaaaataacattgccatattaagatggttgttttggtcgtatgacccatagttttgatacgcagatattgccaaatcacaataatccataccaagctgacagcggttaatatcaatgacatgattgtcagcgtatttttggcaataaaagatggattgagcagctcattaataccgctaagcaataacaaccaagtatattgaagaacaaacatacttgcaatcatcgcaatcatcagaaacagtgcgatgattgctgggtatttgggtaataaggcgatggatttgggcgttagtgacattcaagctgtaattgttcaatgagtgtatttaggatatcatcagcggtttgttcaggatactcaagcggaaacatatgcgaccctaggacataataaacaggtatatcaaattttttgtgggcatcatcataagagccaattttggtaaaatcgctgtcttgacctgcaattaaagcgactggcttggcaggtgagatggattttagccaatatagtgatggcatggtgcgaaaaattgcactctctacagatttgggaatgcttagcgtatatttgccatccgccgttggcttaaaaccgtatttgatataattttgaaaactgcgttcatcaaatgatgcaaacaaagccttatgccttagggcttgatatgcgtcatcacggctatcaaagacatctttgcggtatttggatttttgggcgggcgttaattgatcaatcaaatggtattgaaattttggaatacgccctatgtatttatccatcgtcttagttacatgatataaaaaagcagaacgagctgtcagcaaagaagggtctaataaaactgcttggctgatgggttttgggttagcaatcaatgtctgtaaggtcgtcatggcacccaaagaatgtccaactgccaccagtgttgacacgccatgctcacggcaggcatcatcaatgctatcaccgacttgatgggtcatactttgccagtgatgatcaacaggatagttggggtgtgtgcctaattcattgattgacacgatggtaaaatatctggcaagcctatctagcatgacttgatatgttggtgtaggaataccattggcatgtacaaaatgtaacagtggcttgccagtttttatggatttgggcagcttatttagctgatgaatttgagtgagtgtcataagatcatcctgattgagtgtttttattactatgattcatcgccagttagttatagttatggtttgtattaatcaagcatacatgactttaggtaaattttccagtatttaacacacaagccgcaacaaatccaccaaggtttggtgtttcttagtcatttattgtcttaaaatatgctataattttcatgataaatcatcaattttgggatattgctgtcatttatccctaagtttagctctcacatgaagtcatcaatattaactgcacttaagttaatcacaccaattttgtattttaagaaggatgaatgatgagttattttggcaccgatggtattcgtggacaatttggagtttttccaatcacacctgattttttattacgcttaggttttggtgcaggtcaggttttaatgcgtcaatcgctcaataaacgcccaagcgtcttgattggcaaagatacccgattgtcaggctatgtcatcgaggcggcattgcaggcaggatttaacgcagcaggcgttgatgtgcatatgcttggaccactgccgacgcctgcaattgctcatttggtgaaaagctttcatgcggatatgggcgtggtcatttcagcatcgcataatccatatcaagataacggcgtaaaattttttaatcatgagggcaaaaaaatctctgatgagatgcaaaatgccatcaatgatcaattaaccgctttggttgatgatacaaatgccagtttggctcgcctagagggcattaaagctgacgctattggtaaaaatcaccgtatcgccgatgccaatggtagatatattgagtattgcaagggaagttttccgtatcatctaaatttatccaatcttaaaattgtgattgattgtgccaatggtgcaggctatagtgttgctcccagagtacttcaagaattaggtgcacaagtcattgcaattcataacacaccaaatggcattaatatcaatgacaactgtggttcaactcatcctaatattattcaggcggcagtgcgtgagtatggtgcaggtgttggcattgccctagatggtgatggcgatcgcattattatggcagacaatcaaggaaacattattgatggtgatgggattttatacattcttgccaaacaccttaagcctgtaggcgtggtaggaacgttgatgagtaatgtcgcacttgagctggcgttggctaatcaagggattggattttaccgagctcaggttggcgatcgttatgttatgcaagcactccaagagcgaggctggagtatcggcggcgagccatcgggtcatattttatgcttggataaaagccgtactggagatgcgattgtggcaggtttgcaggtgctaagctgcatagcagaaacaggcaaatctttaagagagttggttttggattatacgccttttccccaaacgctcattaatgtacgtttaactcaaatgagcaacccttatgataacgatgagctaaatatcatctttaaaaacgcagaagaacagctgtctgaccaaggtcggttactgattcgtcaatcaggtaccgaacctgtcatccgtgtgatggttgagcatcaaaatcaggcggtatgccaagaggttgcccaaaaattagcggcagaagttcggcgtgttttggcttaaatgaattgacataaaagtaactggtaaaatgtcaagtatatcattaatatacaataagtatgtaacttgtcagtactatagcccataagctctatgagatacgggtgtggtaaataactattttggcaagtttgggtgatttgtgatgacaatgaggagatttgaatggatttaaccgattatcgacaatcctatgaaaaatacagtttggctgatacaggattgccaagcaatccattgactttgtttcgtgcttggtttgatgaggcggtcgctgccaaattgcctgaaccgtatgcgatgagcttggcaacttgtggcggtgataatcgccccagcgttcgtattgtgttgatgcgtgagctcaccgagcaaggtgtggtattttataccaattatgacagtgccaaaggtcaggatattgctgacaatcctaatgctgaagtgttatttttttggaacagtcttgagcgtcaggttcgtttaagtgggcaaatggttaaagtttcggccgaaaaatcagcagcttattttgccaagcgtccacgagaaagccagctgggtgcttgggtgagccaaccacaaagcggcgttgttgataatcgccaaacaatggaagaaaaattcttggcactagagcggcagcatactcaaaatgtgccttatccaagtttttggggcggttatgagctaatcatcgaccatgccgaattttggcaaggtcgtcttgggcgtatgcatgatcgtatggcatacaccaaacaaggtgatgagtggcaaatcatgcgtcttttaccgtagtgccagcttatgggcgattggttgatttgtgatgattggtgtttggtattttatccatacctaaaaccgaatcagccaatgacgcattttggcaacctttacaaccttatcaaaattgctacatatcgcaaccatttaatcagtttatttgcattttttatgtagattgtcatacagtgatttggcaaaataaaaatagatgctatcaaatatatcacatagcattatatcaagaatatcaagggaaatttatgttaacttcaaccctaaaaaccgccgtagtaaacgccgttatcagtggtgctattatggcatctgttatgatgcctgtcgctttgacaacagttgcccatgctgccgctgcttctcaatcacaggctaccaaaaatttaaacagccaactatcaggcattcgctcgatgacggcaaactttagccaaactacacaagcaggcaataaaaaaaccaattttacaggcatgatgggcgttcagcgtcaaaatcagttccgttgggaaaccaaatcgcctgccgaacagttgattgtcgctaatggtaataccatgtggatttatgataaagatttgcaacaagcaactcggcaatcggttggcagtcaaatcggagaagtacccgcattattattgtcaggcgatccaagccaaattgatcgccattttaatgtcagccaacctgatgcgaataaaaactactttattttaacacccaaatccagtaatgctaattttggtagcctatcattaagctttaatggcggccgtcccgtgatgatggtacttcaagattctattggtcagaccacaaccattcaatttagtaatattgctttaaataaaaaattgccagcaacgcagtttaatttcacgccgccaaatggtgtagatgtgattaatcagtaattttttacaataaaaggatacgctatgaaacaaattaagattaagattgaaggtatgacttgtggtggctgtgtcagtagcgtccaaaaagccttacaagcggtggttggcgttgaggcaatctctgtcagtctagaagatggcttggcggtggtggcatatgatgagtcagactgcgatgttccagcaatcgttgaagcaattgaagaggcaggctttgatacgcaattggtttagttgataatacaacttaaatatgtttggatagattttggtataccatttgttgaaaaaatctcaccataatcatttgaaatgatttcttgggataaattcattgctaaaatgatgtaattttgtaaagtgtgttataatatccccattttataaaattgagatcacatggggtgattatgccagccgaatggtcagccattgtctatttacttgccagtttagggcttgtcgtctttatgcttgtcgtgccacgcctattgggtgggcgttcaagcggttctcaaaaacaagaaaactttgaagcaggcgtggtttcagcagggacggctcgcattcgtttgtctgccaaattttaccttgtggcgattttctttgtgatatttgacttagaggccttgtacttgtatgcctatgcggtgagtgtgcgtgaagtaggctgggcagggtttgccagtgcttttgtttttattgccattttatttgtggggcttgtctatgagatgcaccttggtgcgatgaactgggcgcctgccgataaacgcattaagaaaaaacgcattctaagccgtcctgctgactttgatttgactgccattaccgcttttcatggtattgatgaactgcacaccgaccccacaggaaaagtccctgcccagtcatcagggcggatttttgcagggcgtaaaggcttacaagcggtgcttgacaaggacagcgaacagatgacaaacattgaccacattaataccacaggccaggtaaccacccaagattttaactcataatagcaccgccaattgattgacagtgtttgttggtatgggtgatttttaagtgataaggggtgctcatgataataaaagggtataaaattgattggatgtttgccatgcttgccataatttttatgatagcagcaattgtttctaataattttgtattcatgggttcagtaatcatttgcctgatttttggtgttaagaaaagaaacaatcctgaccattaagacagtagagcagatggcaatgataaatcaagggtaaaatctgatttgcaatcctaaggcagtcatttggataaatccaaaaccaaatctaaaataacgccagtttattaaccagcaagattaagacgatgaaatatacgctcaccaaaccaaaccaacataccaagcaatacccacaacaaagccgtgaaatcattgacgatatcacccaagccgaggtggataaaaatgtttttttgggcagattgtccgatttgacgcacaaccttgccaactggggtcgcaaaaactccttatggccctttaactttggcacaagctgttgttatgtggagtatgccacgaccttgacaggcgtgcatgatttgtctcgttttggggcagaggtcattcgtgcctcccctcgccaagctgatgtgatgatagtggcggggacttgttttgtcaaaatggcgcctgtgattctcaggctgtatgaacaaatgttagaacctaaatgggtcatctccatgggggcgtgtgccaactctggtggcatgtacgacatttattcggtggtgcagggggtggataaaatcttgcctgtggatgtgtatgttccggggtgtccgcccagacctgaggcactcattcaagccatcatgctattacaagagagcattcaaaaagaacgccgtccgctgggcatttatctgaatgaacaaggcgttatccaacctatcatgacacccgaacgagaccgcaagatggctgaccgcattgctacggtcaacttgcgtagccaagatgatgcgttttaagctgcttaagtttaccctcatcacctaaatatggctgagtaaataaaaatttcaaaaatgcgtaaatttttatacttttaaaaaaattggtaaatacgaatgagcataaatcacactcatgattttggcgtgttggaagaattgaccgcaaacaaccatacttatatcacacaatctacggcagacggcataccaaccatttgggtggcttgtgatgagctgcttgatgttttgctgtttttacgcacattgcccaagccctttgtcatgcttgtggatttgtccgccattgatgagcgtttgcgtcagtaccgccatggtttgcctgacagtgattttacggtgttttatcatctgatgagcttggagcgaaattcagacattcgcattaaggttgctttaaaagaaggtgagcatgtcccatctgcgaccaagatttatcccaatgccaactggtatgagcgtgaggtgtgggacatgtttggggtggtgtttgatgggcatccgcacctgacacgcattttattgcccaaatattgggaaggacacccattacgcaaagaatatcacgcacgagccaccgaatttacgccctattttttaaacaccgccaaacaagagtttgagcaagagaacttacgctttgtaccagaagagtggggcatgaaacgctctgggcgcgatgaggattttatgtttttaaacatcgggccaaaccacccatctgctcatggggcgtttcgtttggtgttgcagcttgatggtgaggagattgtggattgtatccctgacattggctatcaccaccgtggggcggagaagatggcggagcgtcagacttggcattcgttcattccttataccgaccgcattgattatttgggtggggtgatgaatgagttgccttatatcatggcggtggagaaactggcaggcattatcacccctgagcgtgccaatatcattcgcatcatgatgagtgagttttttaggattaccaataacctgctttattggggtacatttatccaagacgctggtggcatgacccctgtgttttatatgtttgctgaccgtcaaaaggcgtatgatgtcatagaagcggtaacaggctatcgcatgcaccctgcgtggtttcggataggcggtacggctcacgatttgccaaatggctggcagcggttggtgcgtgagtttttggactggatgccaaaacggatagatgaatatgtcaaggcaaccatgaccaatagcgtgctaaaaggacgcacgcaaaatgtcgcccaatatgatgccaaacatgctctggcgtggggcgtaacaggggcaggactaagggcgacgggcattgagtttgatttgcgtaaagcaagaccgtatttgggttatgaaaactttgagtttgatgttcccgtgttttataacggtgatgcctatgaccgctgtttggttaaaattgaagagattcgccaaagtctacgcatcattgagcaatgcctaaataacatgccatctggggcatataaggctgagcatccactggctgtgccaccgccaaaagagcgtaccttacaagacattgaaacgctgattaaccactttgtatcagtatcatgggggcctgtcatgccagcaggagagtcggcgtgcatggtagagggggttaaggggcttaacagttattatgtcatatccgataaatccaccatgagttatcgcacacgcattcgcacgccaacttttgcccatttgcagcagatgcccagcgtgattaacggctctttggtgtctgatgcgattatttatttggcaagcattgatattgtgatggcagattgtgataggtgataattaaaaaacccatttattaaacactggtattattattaatatttgtcttaaattgatgaccaatgaacatatataaagtgattaatatgctaaaaattagtggtaaagcaataaagcccattttttgtataagataggtaattgcaggaaaaataatcagtaatatggtacgactgataaaaaatgccatgccatcaagcagcgaacgatggttgttgggtataatgtcatgaaatttagctgaagcttcaatcattaaaaacttaatgccaaaaaacataataaataaagagatgactattaatacaaccccttttgtcgagtgctgaaacagtgtgattgcagatagcatgagcagtagtgataaaaatagacaaatcagaatatatgtgtatttgtttttaatgttactattaatggcataacttgacaaaagctgagcaagagagacgatggaaaaaaacatgccataaatccatcccaaattgcctgtattaaagtttttaataactggttgccatagttgtaatatagtttgaaaatatattagcaagatagatagcactattagcccataacatatctcttgttttgttttgagtattgagattaaacgacccaaattttctgagaagttgggtgtattaatctttaaatcacttatattattatgcgtactttggtagatatcactgggtagttgtaaaaaagcacccatactgactataaataataatgtgcctgcaataatccatatgatatttgatgctggttctaaaaaactggcgcctacaaaagcacaaattgccatacctaggctgttgtatttattgtcataagagagtaaagttttattatctagatctgggtattgtttgttttttatatctattaaataagatatataagcaccaccaaataatgataaggagatggcattaaatgcttctgcaacataaaattgccaaatttctgaggcaaaagcggtagtcaacaaccaaaatgacccaaataaaattccaagtatggtagatagttttcggctatatctatcggcaatgtaagataagggtaaatcaattatcatcattaacccaaattgaaatgattttaataagcctaagtcaattaaatcaatatttttgctcaaaagatatagggtggatatgccaccaatgagcatacgaaagctaccaaaggcaacaccataaaaaatgatggtttttaatgtttttggtatggcaatgattgctgacataaacaatccttattaatagaaaaaatttgttcctcaacttttagtgtattaaagtgtatgcctattcgtttattttttgatagaatttctccaaatttgcctagataacgaataatatcagcagaggcatacattgctgcaactccattgatgggggcataggtggcaggtctaaaattattttcaatatcatggattatttgatgaaatgggtcttggttggtgttatctggtgtgtattgagcacaattaaagcaagctgttattttgggaatataaaagggaccaaatgttgatatatcattgatatagccaacattaatatacgcttgctgtttttttatacatgcagaattaacatagtggattagattatttggggtatctgctgataaaatatataaatcagatctgtgtagcttaagaatatcattttctgattttatatttaaattttgtgttgttattttaatttcagaatttcttttatgtaattccttgcatagaatttctatcttagattgattgatgtcattttcgctaaataaaatttgcctagttagattgcttatttcaataacatcattatcaactaaatgaatctgtccaacacccgcagtcgccaagatagccgcaatatggttgccgatgccaccacatccaataattgtcactgcagagtttttgagattttcttggacaaaaaaaggattagccccctcatgagcaaaatataaaaaatttctactatacctatcgcttgagtcgaatacattatgttgcataattaaattgttattatatacaatatcgaaagcttctttgattttttcatgatggaaagaatctttgcaagccataattctttccatattttcttttgtatttgcaagaagccattcatgaagaataagtgatacattctcccataatcttctatcatctatcagaatttgcttggatccaacacctataatgccaaaattttgatacaagccgatactggtatagtgagctgttttgtatagtttgtccataatcaattatccatcataaattttattaaatttctcaaccaaagcatagcctgataaattttatcaagctatgtctattgcaattaaagtataatatatataagtatatttagagttttctttgttgaatgagatcaaagaataatgattctcaaaaacaagagtctctccaaattttttagttgcgaacggtagaaatcatactactcacctccttgtctgttgtggtattttgatgtagaataatcaaattttatggtgtggctatatgtttgattggttgaatattcctttaataattagactagaataaaagtcaactcatgtcaagatatattttatatatattcaagatatattttatatattaatctcaaaatgggttttatataaaaaaccgaaggcttaacagctattatgtcatatccgataaatccaccatgagctatcgcacacgtattcgcacgccaacctttgcccatttgcagcagatgcccagcgtgattaacggctctttggtgtctgatgcgattatttatttggcaagcattgatattgtgatggcagattgtgataggtaactgccttttttccaaagattgatggtgatttaacaatcagtctaagagctattaaataggcatttatacaggacggtcatgcaagaaataatacaatccattgtttttattgctgccgccatactgcacggaattacaggcatgggatttccgatgcttggtacaaccgcattggcttttatcatgccattgtctaaggttgtggccttggtggcattaccaagcctgttaatgagcttgttggttctatgtagcaataacaaaaagggtttttaccaagagattgtttattatttaaaaacctataaattgcttgctatcggtagcgtcgttggcagcattttgggggtcaagctgcttttgatacttccagcgtcttggctgtttttactgatggcagtcattacattgtattattctgtcaatggtattttaaatgtatgtgcaaaagcaaaaaatattcaagtggttgccaataataaaaatatggttctgtttgggtttttggcaggcattattggcggttcaaccaatgccatgtcccccatattgttaatatttttgctgagtgaaacagagaataaaaatcgcatcgcaaaagcaagtaatctatgctatcttttggcgaaaattgttcaaatatatatgctaaaagaccagtatttgttattaaataagagtgaatacggtttaatatttttactgtccatattgtctgttattggattgtatgttggcatttggttaagagctaagattagcccaaatttttttaaaatgttaatttttattgttttattggtattggctctaaaaattgggcattcaggtttaattaaactttaattcattattaaatgccttaactcgttattaaatgtcgttattaaatattgatattaaatatcgttattaaatcattggcacaatgttttagaattttaaatacaaaaggttaccatgaaaattgttaccgacaaaacccccaaagtggacattcacgccattttaacgccccaagaaattgatggcattcatcatcacattcatcattatccacaagcccgtgccgccgtgcttgatgctttgaaacttgtgcaaaagcgtaacggctgggtcaatgatgcccaagtggtcgccattgccaacatgcttggcatcagtgtggcagatgttgagggggtggcaacattttttaatcgcatttatcgcttgcctgttgggcgacatgtgattttggtttgtgatagcattgcttgctatttgacaggttatgagacgcttttggctgagtttaaggcacagctgggcattgagtttgggcaaaccacagctgatggcaggtttaccctgttgccaatttgttgtttgggaaattgtgataaaggggcaagtgtgctgattgatgaggacacttatggccctgtgctgccgtccgaggtcggtctattattggagcaatatgtatgaataagccaaatgtcagcgaacagattgacgctcgtaaaaatggacttgccccaagccagcttaaccgccaaaaaacgccaatttggggcgtgggactggcggacgggcaagcaccaacgtcacttacgcaccctttgacatggcgactgtatcatcatgatgcactgctgacactggcagattatgaagccttggacggctttgttggcttaaaaaacgccttgaccaaatcacccaaagaggtcggcgagatgataaaaaccgccaatgtgcgtgggcgtggtggggcagggtttaacgcagggctaaaatggacattcatgaccccgcctgatgggggcgtgcgttatttgatttgtaatgccgatgagatggaacctggcacattcaaagaccgcttattgatggagcgtctgccttttcagctcattgagggcatgctcatcagtgcctatgccattggggcgagcgtgggttatgtctttatccgtggtgaatatgtcctagctgccaagcgcttacaaaacgccattaatgagtgtgttgccaatcacttgctgggtgatgggattttggggacagagtttaactttactttgcatattcacacaggggcggggcgatatatttgtggtgaagagacggcactcattaattgcttagagggcaggcgtgccaacccacgcaccaaaccgccatttccccaagtctcaggggcgtggggtcgcccaacggtggtgaataatgttgagacactaaacaacatgcctgccattttgttaaatggggtggattggtatttgaatttgccaaaagccaagggcaaatccaccacccctggcaccaaaatcatgggcgtgtcagggcgtgtcaaagatgcagggctttgggagttgccttttggtcataccgcaagggagttaatagagctggcagggggtatgcaagaggggcttagtttaaaggcatggctaccaggtggggcgagtaccgactttttgaccgcaagtgatgagcatttggatttggtgatggactttgaccccatcatgaaagcgggtagtcgtttgggtacttgcttgatgatggtggtggacgaaagccaagacatggtgagtttgtcaaaaaatctacaacagttttttcagcgtgaaagttgtggctggtgtaccccttgccgtgatggcttaccgtggggcgttaaaatccttgatgccatggataacggacaagcccaagcggacgacattgacaaactctccgagctgacacgagatttgtggcttggcaaaaccttttgtgctcatgccccaggggcgatggagccactcatgagtgcgttaaaatatttccgtcatgaatttgagcaaaaagtgaacaactcaaaaccacaacaaaataaggtgggggtgtaacatggcagtcattcatatagatggcaaaacttatgatgtggacggctcggataatctgctctcagcctgcctgtcgcttggcattgatgtgccttatttttgttatcacccagccttaggttcggtcggttcttgtcgtcagtgtgccgtcaaacagtataataacgccgaggattatcaagcaggcaaagggcggttggtgatgagctgtatggttgcccccagtgatgacatgtacatctctgttgatgatgatgaagccaaggcatttcgcaaaagcattgtggaatacttgatgaccaatcacccccacgactgccccacttgtgaagagggtggtcattgtcatttgcaagacatgacttatatgtcaggtcatcatcgtcgccgttaccgctttaccaaacgcactcaccacaatcaagagcttgggccttttatcgctcatgagatgaaccgctgtatcgcctgctatcgctgtgtgcgattttatcaagattatgcaggtggtgatgatttgggcgtgtatgcgtctaataaccgtgtttattttggtcgcccagaagatgggcagtttgacagtgagtttagcggtaatttaaccgaagtgtgtcccacaggggtgtttacggataaaacccattctgagcgttacaatcgtaaatgggacatgcaatatgccccaagcatttgccatggctgttcggcaggctgtaacatttcagcaggtgagcgttatggcgagcttcggcgtattgaaaaccgctataatcacgatgtcaatggctactttttatgcgaccgtgggcgttttggttatggctatgttaaccgagcggatagacctacccatccccttaaaaaggtgaatggacaatttgtcaaaaccagtgcagaccttgctgtggatggtgtggcggacttgctaaaaggtaaaaatgtgattggcatagggtcagccagagccagtttggagagtaattttgccctaaaaagactggttggagcaaacaattttagcacaggcgagcgagcgattgtcaaagatgtggtggaattgggtgtggcattattacgccatgaagcggtgcatcaggcatcattggcacagattgagacggcagatggcgtgtttattttaggggaggacattacccaaacggcaagccgtgttgccttgtcagtacgccaagcggctaagaataaagcccgccaaatggcaagtgccctaaaaaccgagcattggcttgctgaacctgttaagcgtatcggacaaagtgcgtacagtccgatttatgtggcgtgtgtggcagatactaagctgtccgacattgccaaagtgtccgctgttgccacaccagatgacatcgccaaactgggctttatggtgggcgatgtcatcaaggcgtatgctgatacgctagatgagattggcaaaagtgagaacgccatttttgccaaagaaaaacagacggatttggtgattgatgatgacatggcgatgcaatttttggcacatcatatcgcttatgatttgattatggcgaaccgtccgcttgttgttacaggcacaagtttgacatcaaaagcaatcgttcaggccgcaggctacattgcccaaaccttgaccgccaagcgtgccaaaatcgctcatgtggagcgtgaatttatagaagtacaaaacgccaaaatccgtgatgaggtcgcccgtcagttcattgaccctgataaaaatgccaaaacggacggtacgcacaccacagagcgagacccaaatgactttgaaaaagagctgtcatctcgcctattaaagacaaatactctgtatgctgataaaacaggcgtgtatgttgccatgccagaggccaatagcgtgggtgtgaatttattgggtgggcaggcgatggaggaggttttggcacaagcatttgaggcggtggtcgtgttagaacatgatttgtcaaatctgaccccaaaccaatttgacaaattaacacaaaaaacactcatcgtactagaccatcagtcttatgaatggcatgataaagctgattttgtgttatcaagtgcatcatttgctgaaagtgatggcacgcttgtctctgctgaggggcgagcagggcggttttttgcaagctatgataaaaaatattatgaaccaaccagcgagctaaaagacagttggcgttggctacatgcacttgacaatgccatgacaaacaagatgggtgagcttatctggcgtcatcttgatgatgtcattgatgagctgattgtagagtatccacaccttgcccaaatcaaagatgtcgccccagagtcagattatcgcattacagggctaaaagttgcccgtgagccacgccgttattcggggcggacggtgttacgctcgcccatttctatccacgaacccatgcaacctaaggacttagacagtggtttgaccttttcaatggagggttatgtgggcgataagaccaatccaagcctcatcccttttgcgtggtcagcaggctggaactccccacaagcatggaataaataccaaaataaagtcggtgagcgattaaaaggtggcgatgtgggcattcgtctgtttgagacactgccaaagacgcaaatggtgtttgggcgtgttgatattgatcatgtgaatgttgctacaagcattttttatggtcgtgcggtggttgtgcctgtacataacctatttacaagctcacgcatgataagccgtagccctgtggtagcaagccaaatcaaacctgccatgtggatgataaaccatgatgatgcagagcgttggatggttaaggtgggcgataaattaaccctaagccagcatggggcagagattaccttgcctgtggaggtggtggattatttggcagacggctgtattggttatcctgatggtgctgtaccgcttatggtcggtataccaacgactgtcaaaaaagcagataaggacacgcctgtctatgtgcctgaccatcaaaagagcatgcagagattggcaagtatcaagcgtgagaatatctttacaccaaaggcagggtttaataacgcaccgtttgcgatgaataaagtgggggcataaatgagtattcgtgtgattcctgatgtgccatcatggcttggtgcttggtcgtttgagtggtggtcgtttgtttttatgactgtccaaacgctgattatttttttagggcttgtcatgacagcggccttgatgattgtgtatgaacggcgtatgttggcgttatggcaagaccgttatggcccaaatcgtgttggctggcaaggctcgctacaactggtggcggacatgctcaaaatcttttttaaagaagattggacacccaactttgccgacaaacgcctatttaccctagctcctgccattgccatgtttggtgctttggcatcttttgccatcattcccttatcgcccacattgggggcagcggattggaacattggcattttatttttctttgccatggcaggtttggcggtgtatgcggtgatgtttggcggatgggcttctgccaataaatttgctttgcttggcggtctgcgttcagcggctcagacgataagctatgaggtctttttgggcttatcgctcatgggcgtggtggcgatgacagggtcatttaacctgcgtgagattgtcttagctcaggcagatgtttggaatgtcattccacaatttttggggtttttaaccttttgtgtggcaggggtggcagttacccaccgccatccttttgaccagccagaagcggaacaagagctggcagagggctatcatgtggaatactctggcatgaaatttggcatgttttttatcggtgaatacgtcaatgtggttgtcatctcagcactcatgacctgtttattttttgggggttggcttgccccatttaatctggatttgccctttatcccccctgtgttttggtttttgattaagactttgttttttatgactttatttgtgctaattcgtggttcgcttatgcgtcccagatacgatcaggtgatgaattttggctggaaagtgtgcttgcccataacactgctaaaccttttggcgactgcttttgtgattttgatggtgaattaaatgtttgcaactttaaaaaatacggcggtgggcatgtttaccattgtacgctccatgtggatggtcaacagccacgccctaagacccagagacacgattttataccctgaacagcccgtgcctgtaccgccccgttttcgtggtcgcattgtgctgacccgagaccctgatggtgatgaacgctgtgtggcgtgtaacttgtgtgcggtggcttgccctgtgggttgtattagcctacaaaaggcagagcgagaagatgggcgttggtatcctgagttttttcgcatcaattttagtcgctgtgtgttttgtggcatgtgtgaagaggcatgcccaaccaccgccattcagctcacccctgattttgagcttggtgaatatgaccgccaaaatctggtgtatgaaaaagaacatttgctcatcagtggtgtgggtaaatacccagaatacaactattatagagtaacaggcatggcaacggacgataaacccaaagggtcgcacgagcgtgaagcagagcctgttaatgtgcggagtttgttgccatgattgatgtgttaaaggcgtttttggcaaatggcagtgtggtgggtttttatgtcttatcgctggtggcaatttgggcaagcctaagggtggtaacgcacgccaatgctgtgcatgccattttatctatgattgtatcattgttggccgtggcgggtattttctttatcttaggtgctccatttgcaggcattcttgaaatcattgtctatgctggggcgattttggtgttatttgtgtttgtcatcatgatgctaaatctaggcacagataccacagaagaaaaaacatggcttaccgccaatgcgtgggcgatgcctgtgtgtctgatgatgattgttggggcggtgctgattggttttattggctatggcacagaccaatccatacagctacaaagcgataccatctctgccaaagatgtgggtgtacgcttatttacggggtatgtgttgcttgtggaggtggcggcatttttgcttttgggggcattggttgcggcatatcatttgggtaaaaaagcacttgatgatgaaaacatcagccacagccaaacatgccctgatatcacctctaatacatgggcaaatcaagacaaagagcaacaggagagagccgatgcaaaattataatgtagatactctaaatgccccctttgcccatgaagtcgccaaattggcatctgatatgggcgtgcctgctcatcatgggctgattttggctgccattttgtttgttattgggctggctggcgtcatggcaagacgcaatgtgttgttcatgctcatgagtttggagattatgatgaactcagctgctcttgcctttgtggtggggggtaacatgtggggcaaggcagatgggcaggttatgtttgtgtttattttgacgctggcagcggcagaggcggcgattgggcttgccatgcttttgcaattttatcatcgttttagaagtcttgatgtcaatcacgccagtgaattaaaggggtagggtggtatgaatttgttagtattgacctttattttccctttaattggatttttgatattgaccatggggcaaggcagaattggcgaaaaacctgctaccatcattggggtgggggcgatggggctgtcggctgtgtgtgcctttgtcagtatttttgggtttttgacaaaagggcaacaggcgatgtctgtgccactttggacatggctgtcggtgggcgattttactcccaaatttgggctgtatcttgatggattgtctgttaccatgatgggcgtgattacaggcgtgggctttttgattcatctgtttgccagttggtatatgaaaggtgaggcaggatttgcccgtttttttagttatctgaatttatttgtggcaagcatgctcatgcttgtgcttgctgataaccttttgctcgtgtatttgggctgggagggtgtgggcatttgctcatatttgttaattggcttttattatcaaaaccgagccaatgggcgggcggcgataaaggcatttaccgtcactcgtgtgggtgatgtgtttttggcgattgggctgtttttactgtttgttgtatttggtacgcttgatatgaccgccatcaatgccaaagcagatgccatgtttgctgttaatgaccccatgctactactcatcgtggcaatgcttatcggcggcgcgtttggtaaatcagcacaaattccactgcatacctggcttgcagatgcgatggcaggccctacgcctgtttccgctcttatccatgcagccaccatggtaaccgcaggggtatatttgattgcccgcatgcaccctttatttgtgctgaccccccaaatgctcttatattgggtgggcggtgttggtgcattgtccatgctggtggcaagtttttgtgcgttggcacaaaccgacattaagcgtgtgcttgcttactctaccatgagtcagcttggatatatgttcatcgctttgggcgttggggcgtggcaggtggcgatttttcacttgatgacgcacgcattttttaaggcgttattattcttggcatctggggcggtgattgtctcaacacaccacgagcaaaacatttttaaaatgggtggtctgcgtcataaaattccccttgtgttttggtcatttgtggtaggtggtggggcgttggttgccttgccttttgtaacggttggcttttattccaaagaagcgattttgtgggagacttatgccacaggacacatgggtttgttttgggcaggcgtgtttggggcatttttgacctctgtttatactttccgtttgatttatcttgtgttctttggagagcaaaaaacgcatggcgagtctttaaagggcataagttacgctttgcctttggtggtgttactgctattgtcaacaggaattggagcattaatccatccccccttggcaaatgttttaccgatgagtgtgggcagtactctaacagacggcaagcacaccgctgaaattatcgctgttggctttactgtctgtggcttggtgtttgcctactttttgtatgtcataaataaaggcaaaattttgacaaaatggacaaattctacctttggcacagcatgtgtttattggtgttaccatggattgggctttgatgcgttgtatgacattatttttgttaaaccctttttgggcatcacaaaggcattaaagtctgacccaatagaccgcctaataaatatcttagccataggtgcttcatggggtaataaattaacaacaaaaacccaaactgggcttttgcatactcatgccatcagttttggtgtaggtctggcggttattttaatcttagcattgatgatggtggtgtaacatggcattagaacaaaattggatactaccagcattgatcgcaattccgttgattgcaggctttttatgctggttaattgaaaaaatcagcgatcgcctgccacgctggattgcactgattggcatggtcattacttttattttgaccttagtgctttggcaacaagggaattttaatacgctactggtaacagatacagcggtcagcggtgagacattgccttgggcggcacagtttatcctgccatggattccaagttttggcattaaatttcatttagcgatggatggcttgtctttactgatgattgcgttgacggcatttttgggtattatggcggtgggctgctcatggggcgaaattcagcgccgtgtgggattttttcatcttaatctgctgtggtcactaggcggcgtgatcggcgtatttttagccattgatttgtttttgtttttctttttttgggaattgatgctgttgccgatttattttttgattgcactttggggacataatgccacagggggtaagagcaaagaatacgcagcaaccaagttctttatttatacacaagcctcaggcttgatcatgttaattggcattttattattagtcattattcagtttagccaaacaggtgttttaagttttgattatcatgatctcttaggggtaaatcttggtgattgggaatatgccatcatgctttgcttttttattggttttgcagttaagctgccaatatttcccttgcatggttggctgcctgatgcccacgcccaagcaccaacggcaggttcggtagatttggcggggattttgattaagacggcggcatttggcttgttgcgttttgtcattccattatttccaaatgcctcggcacaatttgccccagtggcgataactttgggcatgattggcgtattttatggggcatttttggcatttgcccaaaccgatatcaagcgactgctcgcttataccagtgtgtcgcatatgggttttgtcgtgcttgccatttatgctggcacacttgtatcgttacaaggtttgatggtgcaaatgctcgctcatggtctatcaagtgcagcactgtttattatggcaggtcaaatttatgagcgtttgcacactcgtgatatgacggtaatgggtggcatgtggggacagtttcgccgccttgctccatttatgatgttcttttgtgcggcattgttgggcatacctggtacgggtaactttattggtgagattttgattttgattggtgcttttgccatacatccgatctttgtcacacttgccacagtaagccttgtgatggcaggactgtattctttgatgataatttatcatgcgttatttggtcaaaataccacgcttgaattggtgaagcaaaatcacggtacgctaaaagatttgggtaaacgagaattggtattgctactttctttggcaatcggtttggtatggcttggcttgtaccctcagcctgttatggataagtctgaagggtcaatgcagtggattgccagtgcttatgcacatgatgtcatcatggcagatgagccaatacatggcattcgattgattgaagggaatatgggtgactatatgcatgcccatcaccatcagctgcatggtcaaggatatgacgctggtatacatcatcacaaaggctctgatggccgtcatcacgatcaccaaaccaagcagggggaataatcatgaatccgatgatttttgaatctattttatcaatactgcctgctgtgatcgtggcactcactgcactcatcgtgatgattaccattgctgtcaagcgttctcatttttgggcagcaacactcagcgtcgtgggtctaaatatggcgttgctggcagttatttcccaagccttaggcttagtgcctgcaggcgtatcttttggtgaattgtttatctttgatggttttgcaattttcaatatgggtgtgattttgatcacagcattggcttgctgtacattagcatacggctattttgagaccttacaagatcataaagatgaactgtatttgattatgctaatctctacgctaggggcaatgctaatgacaggtgcagcgcatttggcggcattttttatgtcgcttgagctgttgtctgtaccgatgtatggtatgttagcatacaccttcttgcgttctcgatcgcttgagtcgggtttaaaataccttatcatgtccgccaccgcctctgccaccttgctgatgggcatggcgttgatttttgctgatgcaggtactttattattcaaagatttggcaagaaatcttttgattggtaatttgtcaggcttaagtgtggctggggtggtcatgatgttggcagctgcagcatttaaattatcagcagcaccatttcattcatgggtgtcagatgtctatgaaggtgcaccagcaccaatcgctgcttttttagcaagtgtgagtaaagtggcaatgatggcacttgcacttagattctttgtgggtagtatgtttactgccatgccagcttttgagacgattttgattgttgtcattgttttgtctattttaatgggtaacttacttgcaatccgccaaaataacattaagcgtatgcttgcttattcttcgattgcacatattggctatgcattgacagcacttttatcaatcggtgcaggtagcttgcctttggtgagtatgtatatggcagtttatgcactgacatctattggagcgtttggggtgatcacactgatgtcaagcccatatcgtgagcgtggacgcacttctatcagtggcgaagctgatgacctgcgtttttatcaagggttattttggcgtcgtcccgttctaacggcggtactgactgtgatgctactatcattggcaggtattcctctgacggcaggatttgttaccaaatttaccatattctttgcggctgtacaaggcatgcacttcttggcggctggtatgattattttgggtagtgccatcggtttgtattattatttgcgtattttggtcaatctgtaccaaaaacccaaagtcaatcttgagtttgatgcacatcaacattggggcgttaaggcaggcggagtcatggcgatgattatcaccgcacttatcgttatctttggcgtactaccagaagcaatgatgcaaatggttgcccgagcagtgatgttgtaataaagattacgatttatcagtaaatcagcacccaaatgagtgctgatttacatttatgccaatcttggtcatatcaagttaaaccttgacaataaaaaagagcttaatcataagccctttttatcgcatcgtcagaaaattaaacggcacaagcatcacttgccaaataagtttcaagttcttctgaaccgccgatgcgtttgccaccaacaaagacttgtggtactgtatcatggccagtgatggcacgaacacttgtcatgctggcatctcgaccaagtacaacttcttcatatgcaacaccatgagattttaaagcctctttagccttggcacaaaaatcacaaccaggcttggtaataatagttacagatggcttctcttcccaatctggatttaaaaatttgatcatggtatcagcatcagaaacctcaaacggatcgccatctttttcaggctcatcaaagattttgacaatcatgccatcatcaacaagcatcgaataacgccatgaacgcttaccaaagcccaaatcttctttgctaaccaaacgattcataccttcggtaaactcaccattaccatctgggattaaagtgatcttgtcactttcttggtcgtctgcccaagcattcatcacaaaggtatcattcaccgatacacacaaaatatcatcaatgcccagttttttaaattcatctgccaattcattataacgaggcaaatgtgttgatgaacaagtcggcgtaaaggcacctggtaatgaaaaaaccacgacttttttaccactaaaaagctcatcagtgttcacatcaacccactgatcaccttggcgtgtatgaaatacagcatttgggactttttgtcctgtcatgtctttaaaagccataataatgttccttttggttgtgataaaacttgtatgaaaaaaattgatagtatttaatttaatttatatttattatataagaatatttattaatatttcaagtgataattttaaaggcaatcaaggcaattttttgaatttgatgcgtgactgatgatttgactaaagccaaattatcagtcaaaatacacaataaaagtccaatgtctgttaagatgacattggtgattaagatgataatgacaaagagaacatcatgagtgatgacaaagcagtgacattgacggtgctatcaaagacagtttggtcgcccaatttatttagttttacgacaaccagacctaagggttttcggtttgaggcggggcaatttgttcggctgggattatgtgcagatgagctgatttattatcaagataagcatcaagatacgcctaaatctgagggtgtaagtccaatttttcgtgcgtattctgtagtatcgtctccgtatgatgagacacttgagtttttttcggtggtggtggctgatggggagtttacatcacagcttcaatacttacaagcaggtgatcagttgtatcttaatacaataccgtttgggtttttgacgctatcacgctaccaagaaccaacgccaaaaacattatggttattagcaactggcacagggcttgcaccatttttatctattctgcaggatttgtatgcttgggagcactatgatgacatcgtgcttgtatacagtgcacgaactcaaagtgaattggcgtatcaagacaaaattcattcattggcaacaagctttggggggttggtggataatcctgctcgtttttattatgtgccaatcgtaacgcgtgaaaaagtcgctggctgcttatctgagcgtattccaagcttaattaataatggtgagcttgccaagacagcaggggtagcactcgacactcaatcgcatgtcatgctgtgcggtaatccacaaatggttgaggacaccaaagaagcactcaaagcacaggggcttagcatgaatcgtcgtggcgttggtcacattgccgtagaaaattattggtaaaaaccaccagtacgctcttagcttggcttatatttgtaacttgtatttggttaaatcgtggcttgtatcataaaaatagccaattttgatgctaatgcctaataaaaatcccatcatgctggtcatgagcaataagaaataagatggctgatactaaaatcatcccctaaagatattaggggatgaaaattaggggatgaaaaaaggtaatttacattttttctacggtcttaataccaagtaattgcaggccttgttttagagttttggcggtcagtgctgcaagtcgtaggcgagaggtctttgtcttatcatcagagcttaggattgggtaggcttcataaaaacttgagaaaatacccgccaattcaaataggtattgacacaatagatgtggcataccgtctttggcaaccaataatagcacttcttcaaattgaagtaatttgaccgccaaggctcgctctttatcttcatgaatcacaatctcaccgccaatatctgccatatcaagccctgcacgcgcaaaaatcgagcgaatgcgtgtataggcatattgcatatagggtgcagtattgccctcaaatgacagcatattatcccaatcaaacacataatcagtattacgatttttggaaaggtcggaatatttaaccgcaccaatggcaaccgcttcaacgacagcacgcttttcttcagcactaagatcgggatttttttgcttgattagggtggttgcacgctcgattgcttcatcaagcaaatcggcaagcttaaccgtgccacctgtgcgtgttttaaaaggtttaccatccttgccaagcatcataccaaaggtaaaatgctccatgacaaattcatcaggtacaaatcctgccttgcgtgtgatgagccatgcttgctgtgcatgtagggtttggcgtgcatcggtaaacaaaatgacacggtcagcatgaagtgtatgatagcggtaagctgctgcagcgatgtcggtggttgtgtaaagatagccgccatcctttttttggatgatgacgcccattggatcgcctgctttatttgtaaattcatccaaaaaaaccaccacagcaccatcatcttcgaccgccaaacctttatctttgagtgtttgaacaatgctgggcagcattggattatataggctttcacccatggtatcatcacgcgttaaggtaacatttaggcggtcataagtgtgctgacattgtgccatggtgatatctacaagttttcgccacattgttaagcaatactcatcaccgctttggagttttaccacataattacgagactttttggcaaacgcttcatcgctgtcataggcgtgttttgctgcacgataaaatgcttctaaatcagataaatccaaatccttgacatcgtcattttgtaccttttcaagataagcgatgagcatgccaaactgcgtaccccaatcacccacatggttagcacggataacggtattacctaaaaattcaagcgtgcgtacgacgctatcaccgatgatggttgaacgcaggtgaccgacatgcatttctttggcgacatttggggaggagtagtcaaccaccacggtatcattttgggcggtatttacgcccaaagtgcgactgatattggcttgattggcatgtctagatatccactcattttttaagaaaatattaataaatccagggcctgcaatctcaagtttttcggcgatatcatcaatgcttaaatgatcaagcaccgtctgggcaaactctcgtggattcatacccagttttttggcagcacccatgatgccattggcttgataatccccaaattgtattttattggattgacgcaccaaagcctcaacctcgctgcctgcaccagctgcgatcattgcctttttaatttcatcgtttaaaattgcttgaatattcatcgattgcctatggataaattataaaaatgaaaaaattctgattaaataagccatgattttagcaaattttctataaaaaatcttgattaattggcaaatgatgccaagcaagcttttgtatgtttcattaagttaaataagctaaaatactcaaaatcaaaaaaaccgcccaatctctaagataggcggttttttaataatggcggaagctgagagattcgaactctcggtgggctatgaacccacgccggttttcaagaccggtgcattcaaccgctctgccaagcttccataagcggtgtattaataaaaaatggcggaagctgagagattcgaactctcggtgggctatgaacccacgccggttttcaagaccggtgcattcaaccgctctgccaagcttccaatgcgtcgtattatagacgaatttttttgtaaatgcaaggatttttaataaaaattggcataattttgttatatttaaacaccaattgcccatgggggacgatcatggaagctcaaacctttctataaaggcgaaactaagaagttattaaaataatttcggctgacggcgaggggtaccaatctcctcgatactaatttcatcggttgtacgacaatttgtttggggggtgataatatctcgtgccagtgctaccagttcatagatcgtacggcgtgtatggatcagattatctttagggttttgccagctggagcgaatggcaaggggtgcaggggcgggtatagtatggatgccagccttggcaaattgacggcgcgcccgagccatatgatagcgatctgtcaccaaataaactgtcgttgatagctcatgatggctgagtaatttggcagtaaaaacggcattttcgcaagtattcatactggcgttttcgttgataatcaccacctttgtcctgccaatatgctcaatcaaatagtcgcgtagccatggggattcggcaccactggtaataatgctcaaaggatacagcttgtgcagatgaatggcggcatttgcacggctttgggtaaagtggtttaggctgattgtaccagctgagtttttggttaatccaccgccaagcacaacgatacttgtggcatcatcttgaacggtagctaaggtgagggcagaatacagattgagtagactgacaccaagattggcaaatataggcgttaaggcactcgctacgccaataagtatcacagcaccacccactgcaataaattttaaggattttaataccacacatcgcatggtggaagtgcgtttttttgatctgttagttgtagctgccatcagcattaatccagacaggttcacgcactaaggttatgtcaaatttttgtttaaccgcagtgataatcatatcagctgtggttttgatatcctcttgggtagcagtcagtggcgcgtgattggttaaaacaagtgcttgtttggcgtgggttaatatcggcggcacaccttgacctttaagtcctgcttggtcaatcagccatcctgcaggtactttaaccaaagttttggtaataagatagcatggcaaattaggataatccacgcacagtttttgataatgttctgttgagatgattggattttgaaaaaaagagccacagttggccaaaacttttgggtcgggtagtttgctttggcggatggcaataactgcatgatacacatctgtcgtggtaacggtagtcctgccttgatgatttgccagctgttttgcatatgtgtgcaaatcgccatagctacttagaatgcgtgttgggtttttatgtaatcgcagtgtcaccgcacaaatgaagtagcgatttggctcatctttaaaaatgctatgacggtagccaaattggcatgcttgtttagacaactgtttaaactgcttgctcgcccattcataaacctgtacgctgaccaacacatcgtcaagttgtacaccataagcaccaatattttgcacaggtgcagcaccgacaagccctggaattaaggcaagattttcaagtccaaaccagcctttatgcacgcaatcggttaccagatcatgaaaattttcacctgcttgcacctgtaagatgatttcttggtcatcttcaaacagcacacgcctacccatcatgcgaggtaaaagcacggtggtatgcagtctgcttggcaataaaacattactgccacctgatagcacaaaccaagtgttatttagcttaagtgttggcaaagcggctgcatcatgaatgacgatcgctgtatctgcaacagacgacagtgccatagtattcatcgaagacaggtcataattttggtaagtgtcaagcatggaatatgtcaattgatgggcaatgggttgcattatagcggtagcaggtttgataagtcaatccgcagccagtgaatcttgatgatcaagctgccataccgtgatataccgatcggcaatttgctgaagatgggtgtacatttgctcaaaatcttgctcatcgccataataagggtcagcaaccgaccgaccttctggatcaaataagctaagctttgccatatctcgaccattagcatgcatcatggcagtagttttaagagtttgtaagtctgataaattggtgtcatccatcgcaaaaatgagctcaaattcataaaaatcttccaaagaaacttggcgtgcacgaagctgacttaactcaaaaccaagtgactcaccagtggcgatggcgcgtggatcgggtggattgccaatgtgatagcccgctgtacctgctgaatccaaataaacatcaggcaaaaaattggtcagtttggcacgcatgacagcttcagcggatggacttcggcagatattacccaaacaaacaaaaagaatcgatcgtggtatggtcatagtagctaccaatggtgtttaaatttatttaattctcgacgctgctttttatcaggccggctgtctggacgcgccaaattaagcagttttctttgttcagccataaaagcacgctgagttttgcttgcatcagtttcttcatacaatgtcgctgcaagggtagcattaccccgattttcagatagggctttgatgatgattgttttgtcttcaaggcgtgtcgcatgcccttggcgaatggtgagtgtatcgccgacttgtagctctttgctgactttgattttagcaccgttcatatgtaccttgcctgcttcgatggcttctttggcaaggcttctggtgcgaaaaaatcgtgctgcccatagccatttatcagcacgcaccttagtaagcttcgtttggttcataaaatttatcactttatttaattttataggtggttggtggcttgatggttttgtaggcaatcatggatggcgatggcaatttcataagccaaattcaccggtacagcattatcaatcattttataaccgtcattgacattttgataaatgaatttaaagtcatctggaaagccttgtattcttgccacttctcggactgtcattcttctgtatagatactctttgccaacaacaaaacgaaaatcgttggtactgtatttttgcattttaggcgcttgtggatgcagttggcactgacgatctgatgcttgtacagtaaaaccttgttcgtgccatgccttgacatgatttcggctcatataaatgggtgaaaaactgccaatgaaatattcattgttattaatggctttgggattggtttgatttttatctaacgctgcaacagctgtttgttgtaaatcccaaataacatctttgagcgtaattttgttatcgtcttctgcagttgaaccaattgggaagttaaagttaatggctaaatctttacgaaacccaatataaaaaacacgctttctttcttgagcaacaccatagtttttggcattcaccatattcacagtcacatcatacccacaatcatcaaacatgtttaaaatacttttaacagcgtctgaatgtctattagcaagcataccgctaacattttctgccaaaaaaactttggttgtttgttttttaaaatacgaatataatcataaaataactgaccacgagcgtcgttaataccacgcaaagcacctgcttctgactacgtgacaaggcggtccaccaataatgccatcaatatcgtttggaaaatcctcttctaagatatggcgaatatcgccttcaatcaacttggtattatgatggttggctttaaaggttgcccaaatacttttatcgtattcgttagcaacagcaatgttaaatcctgcttttttaaatcccaaatcaagaccgccacaaccactaaataaactgataatattcatacactaaaactaattaacttggctgattttaattgagctggattgttgggatttttgatatatacatcttgaatattaaatccatcaatataacttagcaaaaatatcttttacccatttttctaatgctccacccatttgattggcacgattgagtccatgtaaatcacgggtcagttcataagaaaaatctgtgacaatattaaaaattgcattaataatattcataatattacttcaaaaatagctgataacccacatcttctgttaaaccttgacattcgtagccaatatcagtaagtgcgtctagaatttgacggctattactatgactggcctgtaatcctaccaaaattcgtccttcggcagcaccatgatttcgataatgaaatagggtaatattgaaatcttggcccaatttttctaaaaaattgagtagtgcaccgggccgttcaggaaaaataactctaaataattgctcatcttctagattggcatggcccccaattaagtaacgaatgtgtgttttggccgcctcatcatcggttaagtcataagctgtatagccattttttaccaaagtatcgctaattaagatgcgttctttttgaccttcttttagtccgataccaacaaaaacatgggcggtattggggttggtggcatccatacgataattaaattcagtgatatttcgtccttgtagtacacgacaaaaatccaaaaatgcaccagttttttcaggcaattgtaccgcaaaaattgcttctttttgttcaccgatttcggttcgctcagcaatataacgcaagcggtcaaagttcatgtttgcacccgagatgatggcaacgcagtttttgccacttaggttgtgcgtttggataaattttttcatacctgctactgataaagcacctgccgtctcaacaatggagcgattttcttcaaaaatatctttgatggcagcgcagatttcatcgttagtacaagtgacgatttcaggctcaatcacagtacctgagccatcagattttgataatttggcaatttgataaggcagctcgccaatttgggcaactgctacgccatcagcaaataaagatacctgcggtaggcggacacgcttattggatgctagggcggcttttaggcaagctgcaccttcaggctcaacagcaaccaccttaatatgtggtgcaacttctcctaaaaaagctgctacgcccgccaacagaccgccaccaccacaagcaataaatacataatcaatattacgccactgctgtgtcagctcaagcccaattgttccttgtcctgcaattaccagttcatcatcataaggtgcgatataagtcatgccgtcagtttcagctttatgcatcgcaaagcggttggcttcatcgaagctatcaccatgcaaatacaccgtaccaccaaaggatttgactgcctgaactttgatatcaggcgtcgtggttggcatgataattaaattattaatacccaaacggttggcagaatatgccacaccttgggcatggttacctgctgatgcacaaatgatgcctttttgtttttgagcgtcggataattggctgattttattataagcacctcgtaacttaaaactaaaaacaggctgtaaatcttctcgttttagacgaatgtggttatcaaattttttggaaagtttggcggcaggttcaaggggggtatgaatggcaacatcataaacagtggcttgtaagatggcacggacatagggggtaagcatgagtattcctttattctaccgttgtttttaattttttatcactagaaatttaatggctcataaaacgatttaaccttaagattaagatgtattaagtggatcattgacttggttactgcctattattggtcatatgaccaattaaaaacacgcagcagtaaccaaatctaacatcatttaagcatcaaggcttgccatgaccgcttcgctaaaattgacattggtataaacctcttgaacatcgtccaaatcctcaagcatgtcaatcattttaagaactttttgagcatcatcaatattatcaatgtccgctgtcgtactgggcgacatggtaacctccatgctatttggcgtcaatccagcagcaatcagtgcatcaacaacagtaccaaaatctgcaggcgaggtgataaccaaaaggctttcgccatcgttttcgatatcctctgcaccagcttctaaggcaatctccatgatgctatcttctaggcttaaatcatgaaagatgatttcgccacgcttactaaataaatacgcaaccgaacctgaagtacccagattgccgccatttttactaaaggcgtgacgcacctcgccgacagtacgattgacattatcagtcatggtttcaacaatgaccgctacgccaccaataccataaccttcataggtaatctcttccatattgtcattatcaccacccccagcaccacgctcaatcgcacgcttgatgacatctttggtcatgttggcggcgtttgctttttctagaacggcacgcaggcgagggttattggcagggtctggatcacctgatttggcggctgaaacgatttcacggataattttggtaaaaattttaccctttgcagcatcctgcttggctttgcgatgtttgatatttgcccatttactatgacctgccataatgcacctttactaaaacaataaaaatactaaaaagtaaagtgattgtatcaaaggcttgggtaacttaggtaatcctccaagcctttgatggattcaatcacacaatcaaagaaagttaaaaagataaattttagcaaatttttagggatttgataagcctaaaaaatcacaatctttataatcaggtaaaaagaggataaatctgatcaatgaattgttaaccaattttgattgtcaaccaatgctgatgattgcaaaacctgacctaaccaaagcttgcaaacaaatcatagtcacttgcttcatcaatcacgactgtcagcatatcacctgctttgactgttgcatcaatattgtccacatagacatgaccatcaatttcgggtgcatcagcatagcttcggcaaatggcaatattttcttctgtatcaatctcatcaaccaaaacaaccaatgtcttaccgactttttcggcaagtttttcggcactgattttttgttgtaatgccatcaagcgttcataacgagattgtttgactgattcaggcacgggattgggtaaatcgtttgccaccgcaccttcaatctctgaataagtaaagcagccaacacgatccaagcgagccttggtcagccagtcaagcagatactcaaaatcttcgtcggtttcaccaggaaagcctaccacaaaagttgagcgtatgacgatatcagggcaaatggcacgccatgcttgaatacgctctaaagtattttcgctcatcgctggacgcttcatggcttttagtacattgggactggcatgctgaaatggaatgtccaaatagggcaataaacctcccatgccagcagaagctgtcatgctgtccgccataatttgaacgactgcgtccacatgtgggtaaggataaacatagtgcagtcgtacccaaatgcctaattttgacatcgcctcacacatatcataaaatttagacttaagcggccaaccttcccaaaatacagttttatattttaaatccacgccataagctgaggtatcttgagagatgaccaaaagttctttgacgcctgattttttaagtgcaaccgcttctttcatgacgctgtctattggacgactgaccaaatcgccacgcagcgatgggataatacaaaaagtgcagcgatgattacacccttcagaaatttttacataggcatagtgtttgggcgtaagtttgatgcctgcatcattaatcaaatcaatttttgggtcgtattcttttgatttgatcggttttggtacatgatgattgaccgcagaaatgacctcttcataagcatgagcacctgtaaccgctaaaacggcagggtgcatggtacgaattttttcggcgtctttacccaaacaacctgtaacaatcactttgccatttttattaatcgcttcaccaatggcgtccaaagattcttgtactgctgactcaataaatccacaggtattcaccacgaccaaatctgcaccatcataatcattggcaacttgataaccctcataagtcagttctgtgatgatgcgttcactgtccaccaacgccttagggcagccgagtgatacaaagccaatttttggagtgccatttaatgtggatgtcgccactacaccgctttggtcgatactgcggttttggttatggtttgccttgtgatgataggcaggttcgctgggcagtggtgtgttttggttgttggtttttgggtgaactgtttttggatgaaatacgattgggcttgacatagttgtttggctcgaatgatactggcgaattaaaatagctggtaaaatcatcatagtttagcacaactgcctttattgggcatctgaatttggcttggtgtcgatagtatttgggtgtgctgaccataccgaccgatattttccatcaaagaaaaaatccccaagccaggggagacttggggagaaagtgaaaagctcataaaagctacactaaaaatggcgcagcggacggggctcgaacccgcgacccccggcgtgacaggccggtattctaaccaactgaactaccgctgcatatggtgggtggtaacgggatcgaaccgctgaccctctgcttgtaaggcagatgctctaccaactgagctaaccacg

SEQ ID NO: 31 - DNA, 65792 bp, Moraxella catarrhalis
tttgataaaattactgttatcaacaaaaacattttagggtggttagctcagttggtagagcatctgccttacaagcagagggtcagcggttcgatcccgttaccacccaccatatgcagcggtagttcagttggttagaataccggcctgtcacgccgggggtcgcgggttcgagccccgtccgctgcgccattttttataaccccaagtcaacgatggcttggggttttttatttaaaactttttaaatccatgtcagatgcctattcgtatttgcttgggtttaactgatatcttgccttattttaacttgattgccatcttgtactttggggtattttatgattgtccgagataaatcaaacagtttcaaactactatttgcatggcgtggcacagtgctacccaaagtgttgccaacgatattaggtatcatggtactgtctttcatcgctggttttgtggcacagtttcagtggtattatattgccaccgtgcctgcggttggctttacgatgtttggtgtcatcatctctatttttttgggatttcgtaataatgcttgctatgatcgatggtgggagggtcgtaagctttggggtgctttggttgctaatacgcgtcatctaagccgtgatagccatcttttagcaccaaatgagcgagaatcactactgtatcagatgctactatttgtggcgatacttcgtgatcggttgcgtggacaaaatattcagcgatcacagtttggctacacgaagattgatgatcattatttggattggcttgatcaacagatcaatgcaccgcaacgagttttggaggcgatgcagcaacaattaataaaattagttcagcaaggtcaaatgagtgatgtcatttatatgacaatccaaaaacatgtgattgaaatggggggcatccaagcgggctgcgatcgtattcatagcacgccattgccatttccttactcagcactactgcatcgggcggtatattgtttttgttgggctctgccgtttggtttgcaagccgtcatgggtttttggacaccgttattggttgggtttatttcttatttattgcttgggctagacgagctggcacggcaactagaagagccttttggctttgaccatcatgatttggcacttgatatgatggtgagaatgattgagcgtgaaaccttgatgctgatggataagccactgcctaagccgtgggagattgataagaattttaatatgagctaattttttgcttattatttgggttctgaaagattatccttagtatttggtgcaatcttatgacccttatgagagatatagagcagatcctaaggatggcttggttagtctggcggatttggatctgagagttactctgactgattggtatcatttggcgggagatcttgaggagtttgtatattttgctgttgattgtgtggatatgtgacttggcaagcgttaatactggtcacataattcattaaatcccctgattgtcgaactgcttcagaacccttgacgccttggtttaatacaacctctaaaaccgcaggattactgatttgagcaagatacctatcagcgactggcatatatgaccaatgccaaggttcagaattatatccatgttgtctaccatcgtcataagtttgacaaaatccatatttgggtgcattattttgcagccaattataaacctttacaccttcttttgatttccaataggccgtttccacactattaaaatccacatcagtcccccaatgatggcgactggtgcctggaaaagcagaccattttaggatatttttggcatgattaatatcatcatttgggcgatttccccatttattctcccaaatttgcttttgtctttgataagaacgaaatgctgatacgacgctaagtttaatattatccttttgtgtcttatcaatcatatcgatcaaagagttataaacttcaggatgaattttttcgggctttggggtgtatttttttggaatggacttcagtttggttgaactttgatcaaagactccatgaacttcttgtcggtcatctaaccaagcttgatttgagtgatttttcgatggttgtgttgatacattggcggtatcgttatttatgatattcgatatctctttttgatgaccaaaagctgtcatctctgataaaacaaaaatcagtaaaatccaactgtatttttttaattgttttattaaaatattttcaatagacattattattcagcaaaaaatctagccatcttgacttaatttattaaattcatcttataaaatatcagattataaagacaaagccacaatcaaataaaaagtgattaaaaccaaaaacagctgatgtattcatcagtcatttttggtttgattaatgtttagtttaattggtatggaacatgccaactaaaaaattcggttcatcccatttaaggcagcaacacgataggcctctgccatggttggataattaaatgtggtattgataaaatattcaagcgtatgaccacatttcatgactgcctgcccaatatgaataatttcagaagcatggttaccatagcaatggataccaagaagctcaagtgtttcacggtgaaataggatttttaagacacctgaacgctcgccaataatctgtgagcgtgccaagtgcttaaaaaaagcctgcccaacttcataaggtgttttttcggcggtcagctcagcttcagttttaccaatgcttgagatttcaggaatggtataaatgccagttgggacgctattgacaaactcagcatcttcatcacctaccataaaccctgctgcattacgcccttggtcgtaggctgccgaagccaatgatggccagccgatgacatcgcccacagcataaatatgtggtatgctggtacggtaggttttgtccacttcaagctgaccacggctatttgcggtaagcccaaccgcttctaggtttaggctatcggtattacccgagcggccattacaccataagatcgcgtcggctttgatttttttaccgctttttagatgtaataccacgcagtcatcatgcgtttcaaggtgatcgatttcttcgtggttacgaatgcgtacgccaaattgacggaagtcatggcttagtgcatcagaaatttctttatctaagtagctcaaaagctgatctttattattaatcaaatcaaccacatagcctaaacctgtaaaaatagaggcatactcacagccaatgacaccagcaccatagatgatgattttgcgggcaatataatccatttgtaggattttatcagagtcaaagacgcgtggatgatcgaaatctaaaatctcagggcgataaggacgagaaccaaccgcaatgattgcctgattaaaggtaatggttttggtaggctcctgatcattgatgtacacctctagcgtatgtgcatcaataaaactgccccaaccatgaatgacttgaatttggttacgctcataaaaaagcttatgcgtattgacctgatgacggataacttcacgcgcacgacttaagactttacttagtggaacttgatagctatctttattttgtttaaacaaaggatctcggcgaaagttaataatattaaaaacagactgacgcagtgccttacttggaatagtaccaacatgtgcacaattaccaccgacttggtcacgcggatcgatgacggcaacacgatgcccagacttagcaagtttcattgcagccgcttcaccagcagggcctgcaccaatgacgatggcatcatattcataattgtgctttattttgtttttattggagcgatccaaacccacacgctgaccatctaaaggactgatgagactaggatgggtttgatcgttctctacatgctcaaaagtttgagatttttttgtttgtggagcggtttcaatcaaggcgactgggtcggtatcttgggtggttttgggtttttttgacataaataatccttaatcatggttttgttggttgcaacgatcctaaatgtctggcgagtgcgttttggtggtaagtccattaagcgatcaagctaaattgagacgataagtcaaataatcagaagcttttgacacagttggcttaaataatgaaccatcaatttatgccaatgcttaaacaccaatccgccgctttaggcctgtaatttgtaaaatacgggtggcaatctcctcaacagacatttcagagacattcaaactggggattttttggtgactataaatggcttgaatggccctttgttcttcttgacattgtgccaaacttgcatagcgactaccagctttgcgttcttggcggatgcgtactaggcgttctgtatcaatggtcaaaccaaaaagcttatggtgatatggttttagcactcttggcaattgactggtgtctaagtcttcttcagttaaagggtagttggcggcacggatgccatattgtagtgctaagtataaagaagttggtgttttgcctgagcgtgataaaccaatcaaaataatatcagcaccgtcatagtggttggtacgagccccatcatcattatcaagtgcaaaatgcaccgcatcaatgcgtgccttataatcatctgaatcaactctgctatgtgccatgccagtatgagggttgggtttgtggttgatttcggtggcgatacgattgattaaaccttcatagatgtctaaattgtgtgcatcggcagcattgataatttcacgaatatcatccgagacaatggtatcaaataccaaagggcgtagattgctggattgataagcgttattaatgcgttgaacggcttcacgcgctaaaagtggcgtatcaacataaggaatgacctgaatgtcaaattccacatcgctaaactgacttagcaatgattttcccaaggtttcagcggtgatcgctgtcccatcagaaataaaaaaagcacttcggatatttgactgtttttcttgttgagcaggtgtgggcgtgtggacatacatgtcagtacttcatcattaaaccaaaataagtgtttgattataacataaaaaagcaattttgcacgccatgggcagatgaactttaaagagcgtggctgtcatttagagatattattagagacattatttttatcattgatgggtatatttttattatgaataaatagataaattgattgagaaatggcacatttatcgctataatcgctaaaaatatcccaaaaatctgtggtatcatttctttgacaaaggcgtgggtaacatcatgccaaagtttttgttcaccaatcggagctaactatgaacaagcaagtccaagtcattacctttaatcaacttggtaaaaatgatgttgacattgtcggcggtaaaaatgcctcattgggcgagatgattagccatttgggcggcttgggcgttaatgtgcctaatggttttgcaaccacggcagatgcgtttaaccgctttttgaatgaaacaggcttgcttgataaaatcaataccgaacttaagggtttggatgtcgatgatgtggatttattaacccaaataggtgccaaaatccgcagctggattatcgaacaagagctaccaaaagatttagaaaatgaaattcgtaccgcttttgcagaattatccaaaggtgaagatatcgccgttgctgtacgctcgtcagccacggctgaggatttgcccgacgcctcttttgcaggtcaacaagaaacctttttgaacattcgtggtattgataatgtgcttatcgccatcaaagaggtctttgccagtctttataatgatcgtgcgattgcctatcgtgtgcataaaggctttgagcatgcaggcgtggcgttgtccgcaggcattcagcgtatggtgcgttcagaaacgggtacttctggcgtcatgtttacgcttgacaccgagtcaggctttaatgaagtggtgtttatcacagcaagctatggcttaggcgagatggtcgtccaaggggcggtcaatccggatgaattttatttatcaaaagtattgcttgaacaaaatcgccctgcagttatacgccgtaatttgggttctaaacaaaagaaaatgatttatggcgatgaaggcagtaccaccaaatcgaccaaaattgtcgatgttgataaagctgagcgtcatcaatttgctttaagcagtgaagagctaacccgccttgccaaacaagccatgattattgaaaaacattacggttgtccgatggatattgaatgggcaaaagatggcgatagtggtgaaatctttatcgtacaagctcgtcctgagacagttaaatctcgtcaagacaaaaaccacatggaacgctatgtcatcaactcaaaaggtgctaaagtcttgacagaagggcgttcaattggtcagcgtgtcggcagtggtaaagtacgcatcgtgaccaacttaactgaaatgagcaaagtgcaagatggcgatgtgctggtctctgatatgacagaccctgactgggaacctgtgatgaagcgtgccagtgcgattatcaccaaccgtggcggacgcacttgccatgctgccattatcgcacgagaattgggcgtgcctgcgattgttggttcaggcaatgcaaccgaagttttggttgatggtcatgaggtgacagtttcttgtgcagagggcgatactggctttatttatgaaggcattttggattatgaagttcagcgtaattcaatcagcaccatgcccgaacttgcctttaagattatgatgaatgtgggtaaccccgaccgtgcctttggctttgcacagattcccaaccaaggcgtgggtttggctcgacttgaattcatcatcaatcgcatgattggcgtacatccaaaagctttattaaaccttgatacgctaccacaagaaaccgtgcaagccgttcaagaacggatggcaggctataattctcctgtggaattttatatcaataaattgattgaaggcatctcaactttggcggtagcattccgtgataagcctgtgattgtgcgtatgagtgactttaagtcaaatgagtatgccaatttaattggtggtaagctgtatgaaccttcagaagaaaacccaatgcttggttttcgtggggcaagccgttatgtgtcagacaatttccgtgactgctttgaacttgaatgccgtgcgttaaaatatgtgcgtgatgacatgggcttgaccaatgttaaaattatgattccatttgtacgcacgacaggcgaagccaagcaagtgattgaactacttgaaaaaaatggcttaaagcgtggcgataatgagcttgaaattatcatgatgtgtgagttgccaaccaatgcagtgcttgccgatgaatttttaaaatattttgatggcttttcaattggatcaaatgatttaactcagctgacattaggtcttgatcgtgattctggtattgtgtcgcatttatttgatgagcgtgatcctgctgtcaaaaaaatgctaagcctagcgattgatgcctgcaataaggctggtaaatatgtgggtatctgcggtcaaggcccctcagaccatgccgatttggcctattggctgatggagcaaggtattgactcggtttctttaaatccagattcagtgcttgatacttggttctttttggcagataaaaataaccaaccagcagacgattacgcataaattcatctaatttcacacccttgaggtatgttaccttaagggttttgtgcttatttttcctgcttgattgtattttattgtatttaactttattcataagccgtacgatattcgtcatgacgacaccaaaaatcgctgaattttttgaaagaattttaaaagagctataccaaaatatctaccaactgtttggcggatcgttggatgatcaaaagctaaccttagcacacatcggcttatcgatattaagtagcggcattaaaatcatcattttacttctgctggtgggatttatctattggtttttggtttataccgtcaaaactgtacgcaaattatttggtctgccttatcgctatgcgcgtatcgctcgtgcgactttgcgatatttatggtttatgaccagcttgcttgcggtcatgtcacaaattggcatcactgataaaactgtcacagccacagccaaagcagcaacatgggcgggtttttattatgtgctttgggcgttgagtggtcaaatggtcagcagtgtactaaagcattatgatttgaatgcttccattgagcagctcttaaaaaatctactactggtcataatactggcacttgcttttgccacagtcatggcaaaatttggctttgatatattttccatcgtggcaggtttgggtattgctggtcttgcggttggctgggcatctcaaagcacccttgctaattttatcgctggtgtcgtgattttggttgaacagtcgtttcaagttggtgattggattcgcttgggtgaaaaagaaggtcgtgtggttaaaatctccttgcgagctacccaaattcttgaccgtgataatatcattattatcattccaaattcaacggttgcctcatccgaggtcgttaatttaacttccaaaaaaatgattcgctttgatgttaaaactcgcatcggattacacgcagacatcacagcagccagaagtgtgattatgaaaacactacaaaaagatgaagtggtcttaaaacatcctgcaccacttgcgacagtatcagagattggtgagtctggtatttatttgattgtgcgtttttgggtagcaccactttcggtcgctagaattccaatcattaaagaaaatatcaatgaaaaaatcaagcgagcacttgatgaatcaggcattgaagtgccatttccttatatgaagctgatcatgactgcagacggtgatcaagcacagcggttcaaatttgaagatgatgaacaaaaaatttaaatatctaaaaaacatctaaaaatatgaatcgcctaagaacatgggcggttcatattttttaaattgctatcatggtttatgctataatactctgttatttcaaaccaaaatttggacttttatgactcagcacagaccttcttattttgccgatcttaaaaactttgatgtcaatgagtttacagtcattgtgacttgtgccgatggtcttgaggctgccttgcaaatcgaactgaacagttttggcttatcaagcgatgtgctgcgtgcagggcgtgtggcagtcattgtggatttggcaaaattttatcacatttgcctatatagccgagtggccagccgtgttttattgccgcttggcgaatatcattttaaacagaaattatcgcaagctacaaccaaccaacctgttgaagtattggatgaggatgtgcctgaggcattatatcaatttgccagtcgtattgattggataaatttatttgggcttgaacatcgttttgcgattcgtctttcgactgacaaacgcctatcggtcaatcaacaatttgccactttacgcattaaagatgccattgcagatacctttaatcgtgcttttggtgcacggcctgatgttgatgccaagcagcctgattttcagatttttgcgacagccaaccataaatttgccgaaatttttttggatttatcgggtgtcagtttacatcgcagaggctaccgtgttgctaataccgcagcgccactcaaagaaaatttggcagcggcactgttgtatgaatgcggttggcatcaaggcattcatgatgccatcatcgatccgatgtgtggctcaggcacattcatcaccgaagcattactgatgcgtgcggattatcctgttgggcttgaaaaggcagctgatgaatttggattttattgctggcagcatcatgatgataaactgtgggatgagatggtgtccgatgccacacagcgatttcatgcgtgtttatcacatctgcaaaacaatcctttgacagtgattgcctgcgatgccgatgcttatgtggtacaggcttgccataaaaatctgatagcggcagggcttagccccatattagatcaagtcaccttggcccagcgtgctttatatcggctgcctaagcttttatccactttgacttgctcaaagcctttaatcatcaccaatccaccctatggagagcgattgggggataccgactttattaaacctttatatcatgggcttggattgcatattgccgctgccatgcggtcagtttctgccaatacaggacaagcgattgatgccacgatagcggtcttggcaagtcatgttgagcatgcagatactttaccaattataagtcctcagactttgcgttgccataatggtgctttgacggtgtattttcgccatggtgagctgagcttgtctgagccatctgccctaatttttgagtggcaaaaacaagagattatccatccagatgctcaagattttattaatcgcttacaaaaaaatttatctaatcttaaaagacaagcgaccaaaataggcgtgaccaacctgcgcgtctatgacgctgacctaccaaattttaatgttgcgattgatgtctatggcgataaaattcatgtacaagaatacgcaccacccaaacaaattcccgctgatgtcgccaaaactcgctttaatcttgttctgcaagctactcgagaagtttttggtgtacctcgtgaagccatttttatcaagatgcgtgccaagcagtcgggtaatgagcaatataccaaaaatgataacgccaccaaacgcaaaaaaatgtgggtggtgcgtgagcttggtgcttatttttatgttaatttcactgattatttggacacaggactatttattgaccaccgccatatgcgtgccaaaatcggtgatgccagccgtgccaagcgagtgttaaatttattttcatacacctgtacggcttctgttcatgcagctttggcaggtgcaaaatcggtaaccagtgtggatctgtctgccaattatttggattggggaaaacaaaattttgccttaaatggtctggtgcttgatgctttttatgatgatggtgagaggtatcaattcatcgcacacgatgtttttgaatggattaaacaccataccgagcaatatgaagttatctttattgatccgccaactttttctaattccaaaaaatttaaagggacatttgatatccaaagagatcatgtggcattaatcaatcgtgcgatgaatcgcttaacttcagacggtgttttatactttagcaataattacacccgttttgaatttgacgaaagtttgatggcacgatatgatgtcaaagatatcacgcatgaaaccattggttttgattttgatctaaaaaaacccatccatcgcagttatgagattcgccataaaaatgcagtcaaatctatgaccgttatcaccaataagaccatggatcaaaatgcacagcatcacatgcccaaaaaccatgatcagcccaagcgttttactaaaacacgcaatcaaagcaccgataaaaaacctcatcaaaagtttggcaaagatggcaaaaaatcgcacactgaccgctttggtcattttgataaatccgcaaaacgagcgacgcctaacgctcgccgttcaaatcatagcgaacatacgccaaatcaaccaagcataaaacgagtttatgtcaatccaaaatcagcagatgaaaatttagccaagcgtttgactgataaacttgccgaagccaatctgcaaggcgaaaaacgatatacaattaagaaaaaaagctaaaacagagtagattatgacaaattcacacattgagcattctcaagcaaaaaccaccgacgagcaacatattgccgatgttcttttgggtaaatccgttcatatgacagaagatggcgatgatggattaccgccagatgatgagcctcatgagcttgatgatggtatcacatctggtcgatttaaaaaattacaaaaaaagctaagaaaagaggtttcttgggcgattcgtgattttaagatgattgaagatggcgatgttgtcatggtgtgcatttctggcggtaaagacagcttcactttgctggatattttgttattcttaaaacgcattgcaccgattcattttgaggtagtggcggtcaatcttgaccaaaaacaacctggattccccgaagaagtattaccacgctacttgtcagagcaaggcattccttattatattctagaaaaagatacttacagtatcgtcaaatctgttgtaccagagggcaaaacttattgttcagcttgctcacgcctacgccgtggttcgctttatgggtttgccaagcaaattggtgcaaccaaagtggcacttggtcatcatcgtgatgacattttggcaacttttttcttaaacttatttcatgggggtagtttaaaagccatgccgcccaaactgctatcagatgataagcaaaatatactcattcgcccactggcgtatgttgccgaaaaagatattattagatatgccaattataaaaaattccccattattccttgtaatttgtgtggctcacaagaaaatctacagcgtgccatgattaatgatatgttgcgtgagtgggataatgcccaccccaagcgtttggcaagcatgtttaaagccttgcaaaatgttgcaccaagccagcttgctgaccgaaatttatttgattttgagcatttaacgcttgatcgtaatgatgatgagcgtttatttgagggcgataatatccaatcaggtgtgactgatgagcttgataaaatgggcctgccaatcaatcctttggttcaaagctttaatccaaaatttcagcaagaaggcgataattctgatgagcgtcagaagacagatcaaaaagataagccgtataaaatccctataatcaacccattggtataattggtatgatcattaacagcctgatttttacattaggctgttaatttatcagtaccctgaacataaattttaccaaatagctagttaagatgcttgataaaccagtccattgccatcgtataacccatgtcacctaaaccgcagataacaccaactgctttatcagacaaataagagtgactacgaaaaggttcacgtgagtgaatatttgataaatgcacctcgataaatggcttatccatggctgataaagcgtcacgaatcgccacagaagtatgtgtataagccccagggttaataataacaccgtcaataggatcggatgataaaagcccacactcaccgatgaaatcgacaatcgcaccttcgtgatttgattgataagcgattagctcaattccatgtgatatcgcttgagatgttaagcgattggtgatatctgtcagagtaactgagccataaatttcaggttctcggatacccaaaagatgtaaattaggcccattaatcaaagcgacttttttggtggtttgaatggtcataaagttaactgcatttgccaaaaaattattgtagccaatttaagcaattttggcaaatggtttaaatacaagattttgagttaacacaattaatcattttaaaaataaatgttcactatttataaaattttattgtattaagcctttgttcttgatgaaaataatgttaagatgaaatttcaaaatcaatcatgatttttggtaggctgatgatatgatgaaaccatcagcctcttttggtaatgaagtagctcagtttgttgagcatttaaggaaaattgttatgtctaaagaacaaggtgttgtaaagtggtttaatgacgccaaagggtttgggtttattcagcgtgagactggcgaagatgtttttgtgcattttcgtgcaattcaaggggaaggctatcgctcactaaaagaaggtcaagcggtagaatttgtcgtaacaactggcgataaaggtctacaggctgaagaagttaccaaattgtaattttataatagcatgaaacatcatcatatgatgataccaaccatactattaaaaaaagcacatggcaagcttgtagtttgccatgtgctttttatccaactgattgattagcatactaatatttcttttgagcagagataattaatcaaggataatcatacaataagcatgcgtcaaatcgattgaccacaaatcgcatttgaggtattgtgcaacatggcataatatccaccttttgccaaaagctccgtatgtgagccttcttcgatgatttttccaccgtccatgacgatgatacggtcagcttgttcgatggtgcttaagcggtgtgccacaatgatgctggtgcgtcctgtcatgagacgctcaagtgcttgctgtacaagacgctcagactcattatcaagcgcgctggttgcctcatctagtagcaaaattggcgcatcctttaagatggcgcgtgcaatggatacccgctgacgctgacctcctgataaaagactgccattagtaccgatcggttgatgtatgcctttggggtgtttatgaaccagttcgctgagattggcggcctgcaaagctgccatcacctccatttcggtcgcagctgggcgtgaataacgcacattttcaaataaggtatcatcaaacaaaaaaatctcttgagagactaaggcaaactggcttcttagattagcaaggttgacttcttgaatattaatattatccaacaaaatctcaccagcaacaggattgataaagcgtggtagtagattgatggcagttgtcttaccagagcctgatcgcccaacaaaagcgattttttcgccagggcggatattaagattaaaatcatccaaagctttggttgtttcattaccatactgtacgctgatatgattaaaatgaatataaccttggacattgctaagcttggttgtaccttggtcggtctcggatttggtatccaaaaaagcacacaccgaatcggctgctaaaaacatcgtctgcatcggtatgctgatattagcaagatttttaataggaccaaacatttgcatcattgccacaataaatgccatgaattcgccaatggtcgtcataccttgctgactttgccataaggcaaaaaatatcaccactgccaaagcggttgagccaacaacttcactgatgggagagcgtgcagcatctgcctgactgatttttttgccaagttgaacgatgagcgtattgacttgattaaatttattggctgagtgttgttgcccaccaaacagcttaatgacccgatgaccttgatgggtttcattaatcacggtatttaaagaaccgatacttttttgggcgttattaatgacaccttttagacgattacggtaatagcgtgataaccccgataaaattggaaacatgaccatgatcagtaaggcaagttgccagtttaaataaaacagtacacaaaccagcccaatgacaatcaaggtatctcgtgttaaaacaataaaaacaccgctggcatgattgatggaattttctaccatttgtaccatgttcatcaacatttcgcccgatgacatactttggtactgttctgatggcaataacagcattttatcaaacatatcttgtcgcagatgaccaatcgcagtcgtggctacccatgccatcagataagcactgataaaacgacaaataccacgaaaaatgaccaaacccataaaaaatagcggaacaacccaaactttatgcttggtaccccaaatggcatgctgaaaactatctacataatacttaagttgtgctaatataccatcgccaatcagcatgggcatatctgtaccgtcaggtaaaacaaaaccttggttaacaagcggtgcaatgaatgccgctaaatagctttctgtgaatgctactccaataatagcaagtaaagcaaacacgatacgcattttataaggtttaacataaaccatcagttgcataaaacttgcggtgtcttttttagaaaacagaccaaaggtaaggttgtgtagcattggctttccaaattggatttataagataaattaaatattataaatttaaatactaatatcaatgggtaggattggtcaagctgatggctaattttgacccactaaaatctaccaaacactggttaaatttattgaccgttttaacttagctttttattatcggtacatattgattggggtattttatcataagtggatatttttaggtataatggctaattttatctgcaaattgattgatagatatgattaggtgactgtacctaattgtacaaattagacgattgacgcttaaatcatgaatgataatttaagcgtatttttaagattaactatttgtttaaggtcttgacggttatttggtctgttttagtgtgaattgatgatcttatctaaaatgcaattttggggcaggcaagataagtcaaggtgccttagtctttcttgatacagatgaatacacaatgtgtcaggcgtgataatatctttgatagataaacgagaatttaatagatgcccaatacagtgatgatggatgggataaaaaacatcaatactttgggcaaaatgagctatctgatagtgctgggcatagtatgtgatggcatcaggcccaatcacgccccatggcatgtttgcaacatgtcttgaaaatccaaattgtttgcgtattttaagtattttttgttttctagatttataccatggtggtacaaaataggggtcataagctgattttaataaggcatgtaataactcactttctttgggcagggccaatattgctccgttgattttagtatcatcttcatatcctaaaagataaccatgattgggcatggttatgggttttaagcaatacacatcacaatcaacatagatgccatgatctgtctgatttaatagctcataacgaaaaatatcagaaaataacgcataactgcctgtggctttatgcttgatgattttttctttgggaataattaagttagcatcgcatatatcaataccagatggcacatcactgatgggtgtgtaggcatgtaaacatacccgatgcccttgttgaacaaaagaagacaaacaagcagcggagagttttccgagtgtatcaccaatccataatgcatgaattatcggtaaattttggttgggataagacataataatatatctgtttttgtactgaatgttgagctattatttaaagccaagtgatgatggtttgcaagatgattgaattgtttttttaaaaaatttctgttaatatatgatgtaaattatcatttgtcaattttaggcttattgcactgctcatttatgaaaatattacatgttttactcactcgcatgcccattccaccgaccaaatatggcggcacagaaagagtattatgggcattgtatcaagggcaaactgccttggggcatcaggtgcgttttttactcaaagccaatgccaatcatgcaccttatgtgcaggtttttgataagtcaaagccattacatgagcaaattgatgactgggcggatatggtgcattttcactttccttatgaaggtgagttacataaaccttttgtttgcacagaacacagtaacagtgaagttgaaaaagagtttccaatcaacaccatttatctgtcttctaaacatgccgaaaataatcacgcaacttgttatgtgcataatggattatactggcctgattatggcgagccaaattttaagccaaaagattactgccattttttagccaaagcatcttggcgtattaagaacttacaaggtgctgtacgcattgcaaaaaaagcaaacaaaccattgcatattttggggggcaatcgctttaatatccgtcgcaatccctattgttatttatcttcacggttgcattttcatggaatggttggcggagtaaagaaaaatgagctaattgccaactcacaagcgttaatctttcctgtgttgtggcatgagccttttgggcttgcagtcattgaaagcctatatttgggctgtcctgtgtttgccacaccttttggggcaatgtccgatattgttacccaagaagtggggcttttgtcagacagttatgcggttttaagtgaagcccttaaagatgtggcacaatttgaccgccttgcgtgccatgaacatgctaagagacattttagtcatttgtctatgtcaaacgcttatttagactgttatgaaaaagttttggcaggtgagactttaaatgcagtcaaaccaaaagcaaagcctgatattaaagcaagacagatgatgcaagatggttgatttaaagaaaacctggttactgatagtaagcttggttactgaaaagcgattctttgaaaaaaagtacgcttaccaatgcttcgatagtattttttgccataatcagctaaagtgcgtcttcgatgctgattaacattttgctttctttgagtttctatcaaacttttaaatgtgtcatcttctgatactaaatgggcttgaatgaccatggcaggattgacttgtaagacgctcatcttactaatgatggcatcaaaaatcacatggtcaattggaaaaaattcaaaagcatctagtgttgataaataatcaagtattatttttgcaccttgttgagaaatgacataacctgcagtgcctgtatgaaaagtttttaatgggcaaagctgtcgatgattaagaacagtaacggctttttttatgtgtattttttccacccaagtttcaagtttaatgacatcaacggcattttgttgtagccaaattgtcagttcttgtaagaattgttgagagtcattccccaaatagacatcgtcctcaaaaattgccatataatccaagttttcatcaatcatctgttgccatagtgctacatggcttaaaaagcaggctttttcgccatcggtgagtctttggttgttggtgattgggattgaaagcttttgggcgtacttgctaatatcagtgggtgttactgcatcaaaaaactcaaaggcaatgccttgtttgccaaattcacacataatatgttctcttctttttgtggcagtttttacactgatgacaaaattttgtatcatggtttatccttattatttaaccaccatagcatgatatatttatctagggtatagcccatcgatgccatggcaagaatatagccataagcaccacccaataagtcgccacgaatgacatactctcggataaaagaaaataccgcccgaaaaaaaccagcgatgagtgatgtgtttttgttgtgggtgaatttatcttttgcccaatcgtaactatatcggatattttttaataaaaaatgatgcaaattgtcgttggttaaatgtttaagataaccatctaataccatgcttggcttgccatattgattgagtgattcgtggacttttaaatcagaatattgaaaatgttggcgtgcataaagtcgtgatagtttgtcggcataccaccagcgtggttgtacctcaatgccacaaaaggtattaactcgtgccacactaaatactttatcggtttgcacaggatttttgagtacatcggtaatggcttgtcgcaagggttggtcaaggcgttcatccgcatcaagcacaagcacataatcgcctgtggcataagcttgggcaagctgtcgctgtttgccaaagccttgccaatcggtattgacatgccattttgccccataactttcggcgatttggcgagtgttatcagtactgccactgtctaacacaatgatttcatcaacaatatcatgcaccgtctctagacatgcttttagatgtttactttcatttttacaaatcatcaccaatgacagcgtggattttttttgtgagacattaatgggttttaagttttgtgccatcgccaccgaatgtaaaaaagcgtgttcggcttggttgtgggttaaatcatacagacaggcatatttattaaatgtatattgggtaaaaaataatgaataaatcagcccataacgaccttgtaagaatcgaccgtcaagtaggtattgtttaataaatgcccataaaggattaaccacaactttataaaacttgccctttttgccttgagcgtgcctgtcatctgcccatgctttggcataatctaagcgtttatttagccaaaacagtggcgtgggggcggtgtggtggtgtaaaaaaccacttaattttttggttgttgcgtcatttaatatcacagattcatgcactaggttgttgtcatattgaaactttttgggatacagtcgccaatgggccttaaccccccataaggcattatcaatttgatgcccaaagacaaaatcaagccgtttgatgccataaaccgtatcggtaggggggtttttgatgacctttaaaatgctgtttttgagctgtggtgtcaccacttcatcagcgcccaatgccaaaatccagtcgcctgtggcataagcttgggcaagctgtcgctgcctgccaaagccttgccaatcggtattgacatgccattttgccccatgactttgggcaattttttgaccatcatcggtgctgccactgtctaaaatgatgatttcatctacccaatcggcaatggcaggcaaagaaaccttaagattgtcagcttcgtttttgacaatcatcacgacagataatcggtaccgcttggctgtattcatgataataagcttagaaaatgggttgaagatgaaacattgaacaatgggaagttattttacttaactttaagttgcttttccagttattttaaacctagccaaaaatataatttctaggtacaatagcgacaagcaatcatggcaacatgaatgatcatttaatcacggtattaaaatttaatgaaactcatcttttttgcaaatgttgtatttatcatggtcatgttggtggcttgtggtgatgaacctgctgtatcaacatcagccaagacagcaacaacagatcccaaacaagacttttatatcggctgctataccattgacaaaaatacgcctgccagtattaagatcagtcaagcacaaggcggctacaagatgcaaatgaaagaaccaaacgatgccgccaaagcttgggatacaccagagccactgcttgtactcaccaaacaagatggctggaagtatttttctaccaatgccatcaatttatcagtcaatgatatcaccgatcaggttatcgtaagacctgacgggctattggttatcgctaagctgcatgatgccagtacgaacaccaatcccatgcttgatagtcgctatgctgttgccttaatgggtgcggtaaataccatctaccaagtcgcttgtgatgataaacgcattaatttaatacaagcgttttaacataaccaatcactgatttgggcttaagtactaaagggtaaggaaaaatggtatgggatttttaggttatttgttgatgggtggcattgtttataccattggtttttttattaatcttaaacgattacaccccaagcgtcaggcgggtgcggtcatttgtgtcacacacccaatcatgattggttatttgctgggatgttttatgattatgcttggtgtgtcggtattgcttgggcgatttgtattacatcatgatgggccagattgggcgtttattggcgtgaatagtttggtggcaacagtcgtattttattttggtctaaatcctgacacgaccaagatgaatctgcctgattgactgcgtaaaattttgatactttttgacgctgatcgcacttgtgagtgcgattttttttatgacaatcacagtgatgctgcgtactaatatatcataataaaaactaatgatatcatcatatattattattactaaaaaaataataaaaatagttatttaatttatttaatattacataaattcaataactttataatagacacataaaataaatataatcaaatacttataaataaaaaaattaaaatatccatctatatatttttattaattataaatatatagttatttattctttatataggtaataagggtttggttgggtattcaccttttcttttatccaaaaatagcgtatgaaacttgttaggttaattgctgatacttgatcagatcagcaagcgtaattaaaaattgaataaaaaatcaggagtgtacgatgtcaaacaaattatttgacctgattgaatcatcaggggcgaaatgggtggattttcgctttacagatacgcacggcaaagagctacatttaacttttccagcatcgaccgtggacgaagatacgctagaagatggtaaaatgtttgatggctcgtcagtggcaggctggaagggaattgaatcttcggatatgattttactccctgatgccaaaacagcatatttggatcccttttatgaatcaccgactgtcgtggttagctgtgatgtgattgagcctgcgacaatgcaaggttatgaaaaagacccccgctcaattgcacgccgtgccgaaacttatcttaaatcaacagggattggcgatacagcttattttggccctgagcctgaattttttgtttttgatgatgtgaagtggcaaattgatgaatcaggggcacagcacagcataagctccgaagcggcatcttggtcgtcaaataaagagtatgcttggggtaataatggtcaacgcccagctttaaaaggtggctatgcggtgactgcacccatggattattatcacgacatgcgtgcagttatgtgtgatcgtattgaagatatcatgggcgagggtcgtgtcgaggtgcatcatcatgaggtggcatcgggtcaacttgagattggtgtgtcttttaatactttggttaaaaaggccgatgaggttcagcaatttaagtatgtggtgcaaaatgtcgccaatcaatttggtaaaacagcaacctttatgccaaaaccgattgttggtgataatggttctggcatgcatgtacatatttccatctcaaaagagggtgtgaatactttttctggagatgagtacgctggcttgtcaatgacggcattgtattttattggtggtattattaaacacgctcgtgcgttaaatgccatcaccaacccaaccgtcaatagctataagcgtttggtaccacattttgaggcaccgattaaattggcgtattcagcatcaaaccgctcggcgtccattcgcattccacatgtctctagcccaaaagcggtgcgtattgaggcccgtttcccagatcctgcagcaaatccttatttgtgttttgcggcattgttgatggcaggcattgatggtattgaaaataagattgacccaggcgaggcagctgataaaaacttgtatgatttgccaccagaagaagaagcattgattccgaccgtggcagaaaatctagaaactgccttaaaagctttaaaacaagatcatgcttttttattaaaaggtgatgtgtttagcaaagatatgattgatgcttatattgatctaaaaatgcaagaagttcataaattaaatgaagcggtgcatccgcttgaatttgatttatattatcgctgctaattgctgacttatcagttggcagatgtttatcgttgaaataaaccccaagcaggtagaacctttggggtttatttgggataaatgttgaatttaacaacccaagcttatcagcgtcaaattttctctgaaaaataaaagcagatgcggtaaaataaaccatattttaccgcatctgattattatgaccgttcaaaatcatccagcagacaatccaccaagctcatgggcttatccaaaatctcaaataaaacaatatgatattgccattatcggtgctggtgttgtcggtatggtctgtgccattttacttgccaaaagaggcaagcaggtcattattttggatagtaagcctacccctagtaaggcatcgtttgatcagagattggctcagcgagatgccagagtctatgcactcaatcttagcagtatcgatttattaaaaagtgccgatgtatgggacggtatcaccagacgcgccgattatgaccaaatgcatgtatgggcgagagatgattttggtgaattgatttttcaagatgaacacgcctttgaaaatatcatgcttgggtctatggttgagccatcagtattggatgaagcactttggcatcgtgcaaaagcttatgaaaatttaactttaaaatatgagatcagcttggcggctcatggcatggcttttgatgagatgcctgacggtgtgtgcatacgctatcaagctgacaatcaagccaagatggtgaaggctaagctattgattggtgccgatggccgtgcgtctttggtacgccgtgagatgggggtgggggtagataccttaaattatcaccaaaaagccatctgctgtgccatacgaaccgatcagccacatggtaacacagcacgccaagtgatgttgccaacaggcactttggcactattacccattgccaatctcaatcaagatgatcaatgccgatggcagtcgattgtttggacattgcccaagcagattgcagagacatatttgagcgactaccaccaaaatcctgatagcctaatcaataggctggctttggcaagcggctatgtacttggggatattcataagatacagtcggtcgcaagttttccactatctgcacaagccgccaatcgctatcataagggtttaatcgcactgatgggtgatgctgcacatggggtacatccgttggcaggacaggggcttaacttgggcttatctgatgtgaaggcattgctggcattggtagatgtgtatcatgccaaaaatatgcccttaagcacacgcttattaagcgattatgaacgcacggtcaaagggcataattcgctgatgatgcatagcttttctatgattaattttgcttatacatcagcactgagtaatatttctgtgatacgccatgcacgcagtgagattgtcaaggcgatttctaagtcaccatccgtcatgcgtctgctgattgagcgggccaattgctaaagtaactcggtttaatgctttgaatgtgcctgatgaatcatccaaatgagctaaacagcaccattagcacaggtgatacaatattaacgataaatccaaagctgatggcgatgggcataatctgtgtaccacccgcctgtaagatggttggtagggtaaagtcaagactggttacaccgcctaaactcacagcgacagatgtcgaataacgcatgacccatgggataaagattaaggcaatcacctcacgagccaagtcattaagcagggcgacgctgccccaaaccgcaccataagcatctgtcataatcgtacctgatagcgaataccagccataacctgatgccaaagccaaaccctgcatcagcgtgacttcatgaaaaatgcttgcaaaaatgatgcctgataaggtggtacaaaaaataaatatgacactgacctgtagacctgttttattgaccaaggcttgctttaatccaatccctgatccttttaggctgacacccaccaaaaataatagtgccattagcaggatggtggtcgtcttttcaggtggtataaatccagctggcaaaaatttagcagccataaatccaattgccaaacaaatgagctgagccaaactgccccttaggctgattttgggtttttggctgggtagtgtgtgtttagataactgatttttttgagtgaatttatcaaaaaaaaccaagctaatcgctccaaagccaatggtcagtgtgattaacacaaccaaatatttgataatgtccccaaccttttgcaccaaatcatccaccaaaccaagctcaataccaatgacaatcaaaataagataaatcagataagtcagagcctgtccaccaaatgcggccaacttttgtgatgttggtagtgcaaaaccaacaaacattggacttaaaataagtaataatgtgatgattccctgcatccaattccccaaattcatcaaagtaaaaataaatcggcattgtaacatttttacaaaaaattttcgtgattatccaccatattttggatattagccatgttaattttagatttgatataaaatgagtggcttaaagtgagtgaaaatcagcaaattgataaaaaatggtttagtttttggtaactttggcgtaaaattagataaatttttattggaaatagtcatgaccgcaaccgatccaaaacttactcaaaaaaaatctgctgccaaagctgctttaagccatattgaagatggcatgattttaggtgttggtacaggcagtacagtcaattgcctgattgagcttttaccaaaagtgcgtcttaagggtgcagttgccagctcacaggttaccgaggataaattaaaggccttgggtattgagatttatgatttaaatcaattgggtgtgctggatttatatatagatggtgctgacgagattgacgctaaaggcaatatgattaaaggtggtggtggtgcattgacacgagaaaaaatcgttgccgccgcctcaaatcggtttatttgtatggtagatgactcaaaaatcgtcaatacactgggcaaattccctgttgcaattgaagttttgcctcaagcgcgttcttatgtggcgcgtgaattggtggcaatgggtggcgatcctgtatatcgtgaagggtttgtgacagattatggcaatgtcattttggatacctatgaccttgatattaccgatgctgccaagatggagttcaccttaaataatatcgtgggtgtggtttgccatggtatatttgcatcgcagtcagcggatctaatgctaaaagctggcagtacaggcgtggacactgttgtattttaataaaactgttgtattttaataaaataattaaaatacaacacatcaatataaaacaccgcatgattaggctcatgcggtgttttttagcgattcatatcaaggtcggtacgaggaatgtagtaaatataaaagcttataaacattgttaaaagcgataatgaaacgatgaaaatcataggtgcaaaagcgatatgagctgaggctgaatgtagaacaaacggcaacaaaccgccgataagtgcgatgatgatattataaatgatactgacgcttgttaatcgaatcttggcagggaatagtcgcacgacaaccgaaggaattgcaccaatgatacctgaagcaaatccaaatagggcaaaaaatatcaacccatattcaccaccattacgcaaatgattaaaaaacaaagccacttgcatcgccaagaataggctaccaaaagttagcacaataccaggattaagcctatccaccaaaatgccaaatatcaagcaaccaattgccataaataaaattgcaagcacattgccaaaccataaaaccgtttcagagattcgaaagctaccatcaatcaaatctaccaataaaattggcgtaaatatcaataaactgaccataatactgattaacattatggcaggaataatactgatgagcatatttttattgcaaatgatttgaaaaaacgagattgacgacctagcaaagctggttagttttgaggtcagtcgcatggctgttgtgactgtgcgttgatctatctcattgattttgggtggtggtgtcattgagcttgggcttatgctgtgatcgggcatttttgtatcttcagaaagctgaaactcaattgctggcagatgatcaagctgcttgatttgtgagttggtcaaagtggataaactcatgttactaagcattgactcatgtttggggcgaaatgaccgctcagagtgtgcttctaaaaaaatgggcgtttcttgcaagtgtttgtatgatattaagattaaaataacgcttaataaaccgccacaaataaacggaatacgccaaccaaaactcatcatctgtgcccaagttagcgtatcgtctagccagttcattaataaaattaaaaaaatcaaagacagcacacagccagataagattgcaccacaacctacgccaatatggcgtgttggtagatgttcggtgacatacacccaaacgcttggcatgatgccaccaatggcaagactttggataactcgagcaacgataaagataatgggggcgatgaagccaatttgactatactgtggtaataacccgatgaataaagtgaatattgttatgcccagtaaactgatgaatagtgcaggcctgcgacctttggtatcaccatagtagccaatcatcaaaccgcccaagggtctagcaatataacctgctgaaaacagtccaaacaactgcaggcgagaaagccaagtatactccgtaccaccaaaaaagatctgtcgtaataaatcagacagatatataaaaatagcaaagtcaaaaaaagccacgctggcgatgagacttgtaatgagaatggcactaaaatagtgctggctgggtaattggttggctggcatgataatcttctcatgaaataccaatcaaacatacggtttgatggtgcgaagtatcgataatatcttgcaaatctgatgcttcataagatcttatcaaaagcagatacactaaatatccataaagcattgattgctcatggatattctacaaataaaacatacaaaacactagtattatttatacaatttggctcaagctttcatttagatggtatatatttgatgattaatatcaaagtagccaatcgataggcatcagtccagccagccaaatgataatacgatctttatgattcatgtgtggttcgtgatgcaaaatgactggttgaccattttcgatggtatgccaattaatattacctttggcgtcaagttttagttcataggcttgatgggtgatggcttggctattactcaaagctttgtgtagctgtcctgccaatttactatctttgataagaacaccaagctcggtattgatattggctgagcgtgggtcgacattatatgaaccaataaatatttgatcatcatctaccgcaaaggctttggcgtgtagacttgtggtgctgtgctggcgtgtacgccaaaaacgattttcgttatcttggatactctgagcactagatttaatctcaaaaagatgcacgcctgccgccagtagttgctttcgccagtgtgcgtaacctgcatgtacaataccaacatcggtggcatcaaatgaattggtcaaaatacgcacctcaacacccattttagcaagcgtgatcagtgtgtcgacaccttctttggtaggaacaaaataagaagagatgatgctgagttttttgcttggttgacccaattgtgtttgtagctgtgaaaccaaaaattcattaggatctgagtgaccgtttaatttgataacattatctgctatcaaatcaatctctgtccaaaaaaatggtacttgctgggcgagtaaatcttgcccaatggttgaattttgcatggcttggcgataagtgcgtagctcacgatcagcatctgagctgtctttgactttttcaagttcatcaaataccacaggtttgatgccactgatgtcatctttgttgtcatgtttgacaagtgtttcaatatcaaaggataggggtgaagcccaataaatctcaaagctttgggtaattttgccaacgacatgaccaactaacatgacatccaaatcagcaaaatgattaacaggtgcattatttaaatattcattaccgatattacgaccacctatgacactgattttattatcaaatgtcatgcttttattatgcatacgccgattggtgcgtatgggatgtaacatatagtttagactacggaagccacgataaggcatgggattgattaatctgacagcaatatttttatgctttgagatacgtagtaggagctgatcaagttcaggtgagctattaaaatcatcaagcagcaatcgaacaatcacaccacgatcagccgcttcccacaggtctttaagcatcagttgaccagcttcatcgttatgccaaatgtagtattgaatatcaatggattggtttgccacatcagtcagcgtactgcgtgcagcaaacgcattggcacctgttgtaatcggataatatccagattgattggggtgatgatggctttgggcgttgatggctgagatgagaccgtctgaactgccaccatgtttgaccatttggtgacgctcttgaacctgtttggtcaatgccaaactctttggtaagtgaggcgtatcgggcaaatttttgcaaccaacaagtaataccagcatgacagtatgtatactgatgacaaacaaagagcgaaaatgatgagtcatgactcaaaaagtctaaaaatttgatttatcatagcaaatttatccaaaaaaagaagtgctttattaaaattttaccaaacaaaatcgcttcttttttaatcattttggcgatgattgttatcaaatggcgagctattaccaaatcatttaaccacaagtaaaccaattaaccaaaagcgggcattcggcgaggtacagcatccaaaaattcacggcgtgcgtcatgattggtggtaaactcacccaacatgctggtggtgcgtgtggtggattgttgtttgccaacaccacgcatcatcatgcacatatgacaggcatccataataaccgcaacaccacggcaacccgtcagctcttcgatagcactggccacttgcttggttaagttttcttggatttgtagacggcgtgcatacatatcaatgatgcgtgccactttagataatcctaatactttgccatctggcagatagccaacatgggcaaccccataaaaaggtagtagatgatgctcacatagcgaataaaattcaatattttgtaccaaaactaactcaggattatcagaatcaaagacggcattattagccacggttgccaaatcctgatggtagccacgagtaagataaccaaacgccttggcagcccgcattggtgtgtcaattaatccatcacgggtcaaatcttctcctgctgaggagatgatttcggcataatgcttagacaggatttcgtaatcgtggataaagtttacggtatcagaatttgacatattttaagcgtctagtaaaaaaatgcatagcttatcataaaatagcgattgatttaacaaaaaactgattttttcatcactttttgagcggtgatcaaactttttgaaagagttgatgtttaaaattaagtttacatttgtactaattatatcccacattttaaaattctatgctataatggcaaaaatttctatcaaaaggataaagtcatgttactaaaaggtcagcgttttgtggtgactgggattgccagtaaattatcaattgcttgggcgatcgctgaaagcttgcatcgtgagggggcgcagctgattttaacctatccgaatgataaaattaaaaagcgtgtggatatggctgccgaagcatttgatgcggtggcggtgattgagtgtgatgttggctcagatgagtcgattcaagtgtgttttgatgaaatcgccaaacattggggcgtaggtgacgataaaggcatcgatggcattgtgcatgccatcggttttgcccctgccgatcagcttgatggcgattttacccaagcaaccactcgtgaaggcagtcaaattgcccatgatatctcaagctacagttttgtcgcacttgccaaagcagggcgtgaattacttgctgcacgccaaggctcactgttgactttaacttatgaaggcagtatttctgtattgccaaactataatgtcatgggcatggcaaaagcaagcctagaagcttcggtacgctatttggcatcatcattgggtggtgagggcattcgtgtcaatgccatcagtgcaggccctatccgcacgctggccgccagtggtattaaatcatttcgccgtatgcttgatgttagcgaaaaaatcgcaccacttgggcgtaatgtcagccaagaagaagtgggtaatgctgcgctgtttttgttatcaccttgggcaagcggtattactggcgagattttatttgtggatgcaggctttaataccgttgccatcagtgaaaaaatcatgatgatggcaggcgacggcgaacaataacaacgatttaaaactttcataaaaagttaagttggtagtgagcaaaattgtgccaatgacatcaaacattggtacaaatatccgatttttggtatgatacaccataccatttaattgttgagagtgattatgacccagccttttttgattgccccatcgattttgtctgctgattttgcacggcttggagcggatattgaaagcgttcttgaagctggtgcagatgttgtgcattttgatgtgatggataaccactatgtaccaaatctaacttttggttcgatgatttgtcaagcattaaaagactatggcatcactgcacccattgatgtacatttgatggttaagccagttgatggtatgattgagcagtttttaaaggtgggggctgacatcatcacttttcatcccgaagccagtgagcatatagacagaagccttcagctgattaaagatggtggtgccaaatgtggtttggtctttaatcctgcaacacctttatattatttggatcatacattggataaggttgatcaaattttgctgatgagtgtcaatccaggttttggtggtcaaaagtttattgatgcaacattagataaattagcaactgtgcgtcaaatgattgacgatagtggtcgagacattcgcttggaagttgatggcggtgtcaatgtggcaaatattcgcaccattggtgaagcgggtgctgatatgtttgtggcagggtcggcgatttttaatcagcctaattataaggctgtaattgatgccatgcgtgatgagttatcaaaggtaaatcgatcatgaccataccgcaccatcaagcccaaaccacgcatcacaaccccccaaaacccaacaaacccgccagcgtcgtaccgatgggttttaccatagggctatgtttggcaagtttgctattaagcttggcaggctatggatttcgattgatgtttggtgatgagatgtctgaggtattgcgtcatgctgctgtcgttgtgcctgtatttgtgattggcattccgctgatgacttggcttggtgcaactggactaaataaactgggtaaaaccaatatccaccctagaaatgcttggacttttggttggttattatcgactgttgcgatgttatccattatgggagtgtatagctgatgctctccaagctaattcctgatatcatcacgccaaaagatatccctaaaggcttgattttattgcttattgtggcgtgtttgctggtgggtttatcagggcttagatatggcggtgtggaaggatggcttcatgtccttgaaaattggctcgtcgctttggtggtgattcctgccttaactgcattgatctcattgcctttaaagtggcgtgatagcacctttgatgtgcgtatggtctattatttgggtatgtttgttgcacttttatttatgttggcaaagctacgctactggcgatgacttgaaaagcaccaaaatgatgccatataccaagatagactaaaataatgatgagatggcaatcataatgacaaatcaaatttcacaaaccattgaaaattggcaaacgatgagtattgcagaatgcctatcatttgttgatgatttggtatatcatgcgtctgattctgatgaagaggacacactatcaattttacatgagctgttttttcaggaaatcaatgggcgtggtgatgagacgctgattgatgcacttgcttcagccatttctcagtttatggattctgcgacagttgaggagcttgcacagcaagtagagcggacattaggcgtcgatttagccagattatcaaaactggcacgcactcagcgattaaacgcacaggtacaagcatctgacggtgagcatcgccccaagcgcaaggagcgtcagcgtaagcagcaagatcaagaggatttgggtaccaaagagcgtgtatcacggttgcaacatcccagcaaatcaaaaaagaccaaagatggttttgtccaagaaactttgcttgagtttattgaagagtcatcaggggtgatgattttgcgagaagtgggtcatgatcatgatgagcctttggtgagtattgctttttcagagcaagtccaagatatgctaggtgctgatgccagagtggttgggcaagcgatgattcatgctgccatcgcaagtgttgtacaacgccaaagtaatttttggcatgcacatgtgtatgatgaagaaccagcacattatagctgatgtatttgaaactgattcaattgattcaattaagagattaaatcatgccatatttaatctctttttattttggctatttggttaacagatgatgaattggcattattttaatctaattagcctttgatcggtaatgatgatgtccaccgacatatcccaaggctgtttgggtagccgatctgccacttgaaaatcataacaccaagcgatttttaggcagtttttggcttttgcaaatgtgcggtcatagtagccgccccccataccaaggcgtataccgtcaagatcaaccatcaccaaagggcaaatgatggcatccatgtgattggcagataatatcagttttgagcggggttcatgcatacctaggcgatgctttttaagaggtgttttattcagtggttgaatgatgggggcaaatgtcaagggtttgtttggcgtggtgatgggtaaatacgcttgatagtcaagtttttgacaaaattgggcaatggtggcggttggtagttcacaaaatccatccaaataaaaaccaatattggcttttttgggtaatagcggtattaatttatataaaaatctggttgctaggtaagcggatctttgacgctcacagtgactaagcgatcgtctttgcatacgcatgtgtttacgcaaatggacagcggataaattggtttggtggttgctcttggtcattgtgtttatatttggtaatgattattatttgttattgaatcctaggtaaactgatggtatgctaaatcatctcatcatttagataaagtggtacaattcagttagtagaattgcatcgctggtcgtatcactcatcttaagcgacttttatcaaaaaatcaatggagtaaaatatgacaatacgcaccgaaaaagacaccatgggagagattgctgtacctgctgatgcttattggggggcacaaactgaacgcagtcgccaaaatttccgtattggcggagaaagactgccagagcctttaatccatgcgatggcaactgttaaaaaagccgccgccatgactaatgcgacacttggccgcatcactgacgaacaatcacagctaatcgttcaagcctgtgatgagattttggcaggtaagcttaatgatcaatttccgcttgtggtgtggcaaacaggctcaggcacccagtctaatatgaatattaatgaggttatcgccaatcgtgccaatgaaattgctggtaaaccaaaaggcagttatcagccgattcaccccaatgatcatgtcaatcatgcccaatcgactaacgacagctttccgacggcgattcgggtggcggctgctcaagagatgagtaataaactgttgccagccattaataatttacgccaaacattggcacaaaaatcagctgattttgatgagattatcaaaatcggacgcacgcatttacaagatgccacaccgctgactttgggtcaagagtttagtggttatgtcatgcagcttgattatgctttggagcgtattgaggcggccttaagcggtctttatcagttaccattgggcggtacagcagtcggcacagggctaaatagtcatcctgattatgctgtcaaagtcgctaaagttctggcagaattaaccaagctgaattttatcacagcacccaataaatttgaggctttggccgcacgagatgccgaagtatttgcttcaggtgcactaaaaacactggcagcaagcctaaataaaatcgccaatgatgtgcgttggctggcttcaggcccacgctgcggtctaggtgagcttagcattcctgaaaatgagcctggttcatccatcatgcctggtaaagtcaatccaactcagtgtgaggcgatgaccatggtggttacccaagtctttggtaatgatacgaccatttctatggcaggggcttctggtaattttgaattaaatgtttatatgcctgtgattggatataacttattgcagtcgattcgtctgctaacggatgcgatcaatagctttaatgagcattgtgcagtaggcattgaaccaatttacgaaaaaattgattactatttacatcattctttgatgttggtcaccgcactcaatcgccatattggctatgaaaatgccgccaaagttgctaaaaccgcttttaaaaataatcaatctttaaaacaaactgccattcagctgaacttattaactgaagctgaatttgatgagattgtgcgtccagaacaaatggttgccccaaaataaacttttgatactcaaacaccgccagcgatttggcggtgtttttggttgaaaaaaagccataatttagcgataatagcttatttgtccattatcatacgccattcatcatgaccaccacgcaagctcgtcttaaaaagcccaaaaaacctcggcgttcacaagctgatattgtggctaataattttttaaattctgtttttcgtcctgcaaaaaagcagctgactttagcatggctgtgcgatgtcattagcttgctattattcatggtacaagcttggattttggtgatgatttttgatggctggcttttgccatttattcctgaattatcccagcatcaagtgatggcgatcgaggctttggctgtttatgtgatggctttatttggcgtgatgttattacgcgcattgattggttatgccaaagatgcattactcacacgcatcggtgtgcaagcagccagtgatgtgcgtcagcggctattggttaaactgggtgacatgggtcctgctagacgcttttttggctctgatggtgcactggcaagcaaaatcattgatgaacctgagcatctcatcggttatgctcgctttgaaattcagaaaaaaactgccgttagtacaccaattttattggcagtttgtattagttttttaaataaaactgctgcaatgatattactggcgacggcaccactggtaccgatttttatggcgatgattggtgtagcaactgcacgcaaaagccgtgagcagatggatgcgatggcacagcttggcggtcgattttttgattggatacgaggggtgaatacactatctcgtctgggcgtggttgatatcgctgttaaagatattgatgtcagtagcgacaattaccgtaaaaaaaccatggcagtgctacgcattgcttttttaaatagtgcggtgcttgaatttttatcggcattatccattgcacttgtggctgtttatttgggttttgggctgattggaattttaccttggcaatctggtgttgtcataacaacttatagctcagctttgatgattttattattggtgcctgaattttatgcaccactacgccgcttgggtgctgagtatcatgtcaaaggtcaagccgtcggtgctgccaaggagatggttggcatacttgattttaaacatagcaaaaccgagctacatcaggtggatttgatgggaaaagtgggattttgtttaaggcaagtggctgcctttggtgatgatgggcgagtcaggttaacgccgacgacgctgcattttgtggcaggtaaatcaacattattaaaaggggaaagtggcgcaggcaaatcgacacttttacagattttattgggatttgggcaatatactggcgtggttgaggtgtatgatgatcaaggacactatcgctacgatacgctggatatggcgtatcttagacatcagtttggctatttggcacaaatgccagcactgctgcccatcagtattcgtgataatctgacattggcaaaatctgatgcgaccgatgatgagctgattgatgtactagatgctgttggactgtggtctttgatccgtgatttgcccgagcagatggataccatgcttggtgagcggggtggtgggctgtcaggtggtcaggcacatcgccttgccattgcgcagcttttgcttcaagatgctaaggtgtggctgcttgatgaaccaacagaacatctagacagtgagactgcctttatgatcaaagatttattaaaacgcttatcagtgcatcggacggtcatttggattacccatgatcaaagtgttgatatcgcctttgatgatatccatcatttgggggtttatgatgaaatcaaataaaccatttaagcttcgtgaactcatcagtacccaagtttgggtatggatcttggcttggcttctagggcttgtgactgtttggtcagtcttaggattatcgatggtgtcagggtggtttgtgaccatgtcagcagtggcaggcctagttgcggtaggtactcatacatttaattatatgatgccagcggccattatacgcacctttgccattgcacgcacgctatctcgctatggtgacttgatggtatcgcatcatgctgtctttgggctgttaaaagatttgcgtgtacaattttttgccgattgggcaagtttggattttaatgcccgaaacctgcaaagacagtctagcagccaaaaaatgcatcgccttgtcaaagacattgatgttttagatgaatttgttttacgcttgatatcaccttggattatggcaatcggtgcggtgattttggtggctggtgttacgctgttgctattacccaaagcatggtttgggctagtgccgatcggcttggcgattttgattgctgcttttgtggtatatcgtggcattcatttggcgtatgacgagagtactatacttgaaactcgcaaatcaaaactactggataccttgccagcactgacatccttgctgatttggcatcgctgggatgcgtacatacatcagctgagtgatttggatgctcagcaaaccaaaataacactgtcatcacatcgtttacgcagaatgggcatgttgggggtgcaagtggcactggcactggcggcgacacttatgctttggggtgtagggagattttttagacagacagatagtgttgcttttaccattgagacattaaatgattatccgatgatgagttcggcggtcgcactggcagtatttttaggattgatgggcttgggtgagtttatccaaaacttgattgctgagccattggctttggggcgtagtcaggtagccaagcagcgcctcaacgagatgcttgtcggccaaaacgctgctcccaaaatcaattttaatcagattaccaatcagcaggatgctttgactttatggcttaataatgccattgttagggcgccaaatgccatcatcagtgctcatattcaccatgccaagattcgctctgataagccttgcttgattataggtccttcaggtgctggtaaatccactttactgcatacacttgcccaagagcatgatttgacctcgggtgagatttggttatgtaccgacaccaaaaaatatccgtggcagtcagttgattttgaccaatcactgggatttttggggcaaacagttgatatttttgatcaaacgctggcagataatcttcgtttgggtaaaccaaacgcaactgatgatgagcttataacagctcttaaaaaagtaaatttattaacttggctaaataatcaaccaaaaggtctggcaactcggctcggagaatatggtatggctgtgtctggtgggcaagcacggcgtatcgccttggctcgactgttgctatccccaaaagcggtcatgatgctagatgagccttttgcaggcttggatccagatacacgccacaatgtatggttgagtctaattgatgcccaaaaatctggtgatattggcttgttattaatttgcacccaccagctgtggcaacagatgggtgaggttcaggtcatcaaaatcgagggtgagggtcaagtttaatttatcactctgtgctttgcttgactaagtcttgataaacttgaattgtattatcgaccatatcatcaatctcataagcatgcgtcatggcaggcggaatggggtttgataataaaaacttaacacttttacacagcatgatcgcagtctgttctttgaccaatccttgggggtataagtctcctaggatatctgcaaaggcaccttttgcccaaccaatcactggtgttcctaaatgaatggcttgaagtgctgtcatgccaatactttcggggtgattggcaagcgataatacgatattagctgatgacaaccattcacgcatatcaggtggatttttgccgataaaagagacccgatcttgtaagcccaaagtatgcaggcgttggacaaaatcttcataaaaaacacactgatgaatgcgtgctgtggggtcatcatccatgataattgcgtgaatttttggaaatttttcttgtagatttcctaaaatatcaatgagccattcttgaccatattcaggaccgatcggtgttggaaaaaccaaccattttttgtgttcaagctcaggaaattgggtaaaggtttgatgtagccaatgcacagatgagtgatggcgataggggtattttcgaacatccaccccacgcggcacacaaatgatatcaggcaacttgatggatttatcaattttttctgattttactttttcaaaaattttattaaaatgtttatcaatacttttagatgcactgatcagcaaatcaacatgaaacagtgcttttgaataagaattgacaggataaaatccgtataaacttgaaataattttggggcgcttgtcatttggaaaggaatgcattgcccaatataacacccaagcaggcgtacgagaatgtatgtgaatgatatcgggctgatgctgttcaatgatttgacgaagcttaagtgtgtgtatcaatgcccaccagctttttttgggcataggtaggcggtaatatattgccccatcacgcacaagacgcacaacaagcttgctatcgcttggagcactgccgatgatgatagactcatgaccagctttgatgagcgtatgggagatgggataaatgccacgctcggactcatcatgcctaagcgaggatgacagttgaagaactttcataacttattatctgatgggtcaattggttttattttcaagaaaatctaaaattttctcaacatgctctttggctttgacatcccgaaaactaccaatcatctcgccatttttattgtacacaaatgtagagcgtaccacgccaagatgggttttgccatacatctttttttctttgatgacatcgtaatattggcaaagtttttcatcggtatcactaattaaatcaattgataaggcttttttattgataaaattttgatgagatttgataccatctcgagagacgccaaggatataaaatcccaatgattcaagcttggctttatgatgactaaaatccaccgcctgaatggaacagccttgcgtgttgtctttggggtaaaaatacaaaatcaagccctgatgactttgattaagcagttgattgagctgcacagcagtggcttcttgggtatcggctgccaccatggttaactcaaaacttggcagcgtgatggtttcgttagaattttgtagcattaggtatctcgttgtcattttaatcataacagttaaacgatgtatattttagcaaaatttacccatgaaagaacatttttattcatcataattgcttagtaagcatcaattctttctaaaatacatcaatttgcaaatttttgtttggcatcataatgactttgcggtagaattatgcgtttttattttatgaataaccaaattgccttgccatttggcttaccgcttttgaattaaggctttagcgattattatctggatagaatatgactttatcatcctatttaaaaattaatgagcgtggctcatccgtgcgtcaagaaatcattgctggcttgacgacttttttggcgatggtgtattcgatcatcgttgtgccaaatatgttatcagcagctggatttcctgctgaatccgtttttgttgcaacatgcttggtggcaggccttggttcaatattaattggactttgggcaaatgtaccgatggcgattggctgtgcgatttctttgacggcatttaccgcttttagcttagtgcttgggcaaggtgtgagcattcctgtggcactgggtgcaatttttttaatgggcgtggtttttaccttaatctcggtgactggtgttcgtgcgtggattttacgcaacttgcctgcatcgattgcacacggtgcaggcatcggcatcggactgtttttactgctgattgctgccaatggtgtgggtttagtcatcaaaaatgatgcaggtttacctgtgacaatgggtgagtttatgtcgttgcctgtgattttatctttagtggggctggcggcgattattggtcttgagcgattacgcattaagggcagtatcttatgggtgattattaccattacgatgattgggctactttttgatcctgcagtgaagtcagatggtgccattttaaaagtaccaagctttggttcagactctttatttatgcaaatggatgtcatgggtgcgctaaatacagcgattttaccggtggtgtttgccttagttatgacagcaatttttgatgcaacaggtaccattcgtgccgtggcaggtcaggcaaatctactggacaaagatggtcaaatcatcaatggcggtcgtgctttgacatcagattcagtcagtagcctgttttcgggtatttttgggacagcacctgctgcggtgtatatcgaatctgctgccggtacggcagtaggcggtaagacaggcttgacagcgattgtggttggcgtgctatttttattgatgctattttttcagccattggcatttttggtaccaagctatgctaccgcacctgcactcatgtatgtcggtcttttgatgctaagcaatgtctcaagacttgattttgaagattttgtcggagcaatgagcggtttaatttgtgctgtatttattgttttgactgccaatattgtcacaggaattatgcttggttttggtgcattggtgcttggacgactaatttctggtgaatttaacaagcttaatcttggtactgtgattattgctgtcgtgcttgtcgcattttatgcattgggctatgccatttgatactaagcacccaaaaactctgtcaaaaattaaaacccacctcaaagttagattgctaattttggggtgggttttaggctaaatcagactggctaaggtctcataaatctcatgttgtttggcttggttggattttagttcggtgtcaagctgagcaccttcgatggcgtagcgtaccacttgatactgtggatgactatcggtggcggcgaactgcttttgtttttgagccatccagttttgccacacctcaaacatattagcatcagcatgaatggctgttagtagcccagaccagttgctgttcataccaatcttagaatcttgaaaaatcacttgcaaatacgctttggtaaatcgaccttgaatagcacccaattcatcagtgatggataaaattgcagtatttagctgagcgatataaagacccaccacggcatttaacagctcttctttatttttaaaatgatgaaatagtccgcctttactggtacctgcagcgtccgcaactttttgcatggataaattcgccacaccatcactgaccatcaagtgcttggccgccatgatcaacccatgtttaagctcctctggtttattttttcgctttgtacctgatgtgccagcgtgtagattgttttcaccaatagataaattgtcattcatatgataaaccattcaaaattaaaaaatatttaataaaacttatcgttaattgggataaataaaattgggataaataacggtaaaactaaatgaaaccaactggtcggtattttataaaactctatgagaatttgcaagcacagatgcagcaggatgatgaattttatttcttagcagacaaggatgatttaccaaaaattatgctacaataaggggtatttttatcagtttatttggagcgtgcgatgtcaaatcagaaaaaaattccccatgtattgatgattttggatggtattggccatcgtgaagagaccaaagataatgccgttgccgtagccaatacaccaaacttagatgctttatttgccagctatcccaatgggctgatttctggttctggtatggatgttggattgccagaaggccagtttggtaattctgaagtggggcatatgaatttgggtgctgggcgtattttatttcaagattcaacccgaattatgaatgagattgcctcaggagaattttttaataattcagcattgatagatgccattcaagccacactgaataataaaggcgtggtgcatattttaggactgttgtctgatggcggggtgcatgcacacattgatcatattaaggcggcagctaagcttgcgttatctcaaggcgctatgcaagtgtttgtgcatgcgtttttggatggtcgtgatacaccgccacagtctgccaaaggctatgtgactgatattgaagattattttactcagcttaatcaagaatttgaaggtaatgttaaaattgccagcgtcatcggtcgattttatgccatggatcgtgataagcgttgggatcgtgtggaatcttgctaccagctattaaccgaaggcaaatcggtcagaaccgcagataatgctctagatgcaatcaagcaagcatatgctgcaggggagacggatgaatttatcgctgcaactttcattgaagatgatggcgtgattggtgataatgatggcgtgatttttatgaatttccgtgctgaccgtgcacgagaaatcagcttggcttttgtggatacaaattttgatggctttaatcgtcatattgtgcctgagttatcggcatttgttatgctcaccaaatactcagatgagcttgaaaataatccaaaaaccgacattgcctatcatccaacaagtctgacaaatacgctgggcgaatatttacaaaatttgggtaaaacccaacttagaattgccgaaaccgaaaaatacgcacatgtaacctttttctttagtggtggtcgtgaagatctgtacaacggcgaagatcgcattttgattaatagtcctgatgttaaaacatacgacctaaagcctgaaatgagtgcttttgaggttaccgaaaaattaaatgatgcgattgactcgggcaaatatgatgtattaattgtcaattatgccaatggcgatatggtggggcattcgggggtatttgatgcggcagttaaggcagtggaagcagtggatcagtgcataggcgaggtggtcaagcatattcgtgccgctggcggccatttattaatcaccgctgatcatggtaactgtgagcagatgcaagactaccaaagtggtcaggtacacacgcagcataccacagaacttgtaccttttatctatattggtgataaaaaagcgactgtgcgtcgtggcggcaagctgtgcgatgtgtcaccaacactgttggatctgatggggttagataagccaagtcagatgactggagagagtttattggttttttgagtgattaaacaaagaaggtttggtatgcgattttcggcagtaataacggctttattgattggtgcgatgggctatatgagtgcatttgccaatccacaggcttttgatgatcaagcagatgtagacgatctgataatagatacgcctgctttggatgtagcaccaaatcatttgtatggtattgacggtttgcactctgggcgagtgcctttgaataccatcagtcccaccacgctcaaaacttttgtacaagtggttgatttgatgcgtcgtgaatacattgagcctgtagatgatgagatgttgttttatcacgccattcatgggatgctaaatcgtgtggatcgcaatgctgagtttcttgatgcgactgcctttgccaatcttagctcatttaccacaggtaatgtggcaggcgtgggtctaaaggcggtttggaggagccaagatgcacattgggtggtgactgaagtgattgccgatagccctgccaaaagtgcaggcattaatgttggtgattatctacaccagattggtgatattaaacttaaccaatcccaaaccgaaaatgacatcattcagcttttaagtggtatcgcaggctcaagcgttgatatcacttattcaagagcaggtcgatccaagcaatccgtcaatgtcattcgtaaccaagctcaaaagagtagcattgaagtttttgttcaaaatggcattgctgtcatcaaacttcccgtctttcaaaataacaccagacaagatatcattgatcgccttgccttaatagaagggcaggttcggggtgtggtgattgatttacgaaacaatcctggcggcgtccttgattcagccgctgaggtggcctctttatttatgcgaaagcaagtcgttacccaagtccaaaaccgaagtggcatagaaagggtgatagaaacgcatggttcacccgtactagaatccatgccagtgattattttacaaaaccgctattcggcatcagcagctgaagtactggcaagtgcattgcaaacccatgggcgggcaatgatcgtgggtgaggcgagctacggtaagggttcggtgcagtcggtcatcgctttgggaaatcatcaagggattaagataactaccgcacattatctaacgcccaatggcaaaaaaatcgataaaatcggtgtggtgcctgatgtgagttttaaaccaccttctaacgattcacaagacgatgaatggttgcgtttgagcctagatttgatggagcgagtaaaaacaaaccaaagttgatttaagacaaccaaaatcgccatcataagattatcaagtgacgcttttgatggctaattttatcagtgagtctgtaccagcccatgcctgatggcaaggtgcgtgagtttgacatcgctatcaatgcccagtttatcaaaaatccgatagcgataagtattgactgttttggcgcttacaaatagctgatcggcaatttgctgtgtactttgacagttaacaaccatcatggcaacctgtttttcacgctcagataaggcatcaaagggcgactctttttgttcaccaagtacagtttcggcaagctgctcggcaacatcatgactaaaataacgcgatcctgcgtgtacttttttgatggcacgaatcatctcatcaagcggcgtgcctttggtaatatagccattgacacccgcttttaaaagcatggaaggatatggctgagctgtcaaacttgaaacagcaagtaccttgatgtttggattaaactgtttaatgcgtcgagtggcttctacaccattgatatttggcatattgacatccaacaaaacaacatcaggacttatggcgcgcacctgtatcaccgcactgtcgccatcaatcgcttcaccgataacttcaatatttggatcgtcatcaagcatccgagtgatgcccattcttaccaaatcatggtcatctacgaccaaaactttaatactcatcaaacgcccatactatttattgattagaatattgtaacaagaatttaggtttgtgtcgccattttattgcaaaatcatgcattaataaatgagatttggctaatctatcattttagatataaaaagagcccaagatgacttgagctctatgatgctgagcaactattagccttttaatattagcctagccttttaaagctttaattgcggcattcaagcggctcttgtggcgagcggctttgtttttatggataatgcctttatcagccatacggtcaatgactggtacagctttgttataggcttcggttgcaagctcataagattttgcttcaattgcagaattgacgcgtttgatgtaggtacgcaccatagagcgttgagatgcgttgtgctgacgacgcttagtattttgacgagcgcgtttacgagcttgtgcagagtttgccatagggtaaatccttaaaaagtaaaatgctaaattataaaaagtggggcaatgtgtttgaggaagacacaccgcttggacaatatgccgtctatgataccaaaatcttggcaatctcacaatatgcaaataaaaattttcttagtcgattgactgacggacttggtgcttgatttttttgatggattttgtgctagaataatctggaacaagaaatgtaaaatcagcacttggtgcaatcgcttgattgcttgaagataatttatgtattatttagcgtgagtgaaaattgatgaaaaccaaagcaatcttaatcggtggttcgagtcgagtgggcgaggcactggcacaagagcttgcactgatctatgagtcggtgatacttatcacgcgtactcagccacgtgccatgagtgcaaatatgcaggtgtatcatgtggcggattttcgggcacttgcatcaaccattgagacggtggcgattggtgctgatacagatgcttttagttgtcttggtgtctcaaaacagcaagtaccaagtcatgatgaattttatcaagtcaatgtcctgtataatttagaatttgccaaagcgtgcaaacaaaagggcgtgcaacagttttattttttatccaaagaaggtgctgatacccccaatcatgatgatgagctaactgccaaggcagatgtagaatatgatttacgcacgctcagctttgatacattggcaatttttcgtttgtatcgcttaaccttacccaagcaccgcctgagcctaaaaagcctcggcagccaagcactcaatggtgtattatctacactcaataaaaacaaacgcgcgcttgagccaaaacaggtcgccgcttgtatggcgattaccgcctataagcataaccatcagccgcagctacgcacaccaaaccaagccacgatcatcacacatgaacagatgctcaacagcgttattcgccccaataaaaaatccaaataaccaaatcttcatccaagatggctatctgatgtgtgattaagcgtaacacggtttaattggtgattagatttgggatatggattggctggtcttgatttgaccacccaaataaaatccgtgattacctacattttttgggcattttgtgctaaaatattgccttatttttaaggtatttgtgcatgggtttggtgatgagatatttaccataaccgtgtaaattaatcgtttgtagcaaggattatttatgagtgattcggtcagtccaattggcattgtcgaagaattaaagcgttcgtatttggattatgcgatgagtgtcatcgtttctcgtgcgctacctgatgtgcgtgatggacttaagcctgttcaccgccgtattttatatgccatgcatgagcttggaaatgattataataaaaaatacctcaaatcggcgcgtgtggtcggtgatgtgattggtaaatatcatccacatggcgatactgccgtctatgatgccattgtgcgtatggcacaagattttagcttgcgttatatgctggtcaatggtcaaggtaattttgggtcaatggatggtgacccgccagcagccatgcgttatacagaaatgaaaatgcagaagctaacgcataaaatgcttgccgatcttgataaagagactgtcgattgggaagataactacgacggttcgatgaaaatgccaagcgtgttgcctgctcgcattccaaatttattggtcaatggtgcaacagggattgctgttggtatggcaaccaatatggcaccacataatctcacagaagtactcaatgcctgcttagcatacgccgaagatccaaatatttcaaccgatgagctaattagccatatttcagggccggacttcccaacgggcggcattatccatggcagaagcggtatcatcgatgcttatcgtactggcaaaggtcgtttgcacattcgtggtcgctatcacattgagccaatgggcgacagcggtgcaaacaaagaccgtgagcgcattatttttacacaaattccctaccaagttaataaagccaatctgatcaagcatatcgccgatttggtcaatgccaaaaaaattgaaggcatcaccgaaatccgagatgaatcagataaagaaggtgtgcgagtggcgatcgatttacgccgtggcgaaaattgtgaggtaatggttaataatttatttaaccaaacgccacttgaaacaagctttagtattaatatggtggcattggataatggtcagcctaagcttatgacgctgcgtgacttggtggcggcgtttattcgccatcgtcaagaggtggtcacacgccgtacaatttttgagctgaataaagcattggcacgtgggcatttgcttgaaggattggccattgcacttgccaatattgatgatatcttacagaccatcaagcaatcagccaatcgcagccaagctcgagaaaatttattggtgcgtacttggcagtcagctggcgttgttgcaatgcttgacgcagcaggtgctaaatctatccgccctgagatgattgatggcgaggatctcaaagcaccgtatggcttgattgagaataaaacccgctatcgtctgtcacctgaccaagtgaacgccattttggatatgcagttgcatcgcttgactgggcttgagcaggataaattaacgggtgagtatcaagaaattttgggtgagattgcacgcctgaccctgattttggatgattttgatgtcttaatgggtgtggtgcgtgccgaattgattgacattcgtgatgaatttggtgatgagcgtaaaaccgatattgtcgatgcgcgtcatgactttaatcgtgaagatttaatccctgaacaaacggttgttttgacggtttctcgcacaggctacgccaagactcagccgatcagtgactatcaggcccaaaagcgtgggggtaaaggacgctcagcgactgccatgaaagaagatgatgttattgagcatttgttggtaaccagtacgcatgcccatattttatgctttaccaatacaggtcgtgtctttagattgcgtggttttgaaattccgattgccagtcgtggctcaaaaggtcgtcctttggtgaatttgattaatcttgagtcagatgagttggtcacagcaattttgcctgtcaatgacttaaaagacgaaaatagctttgtgttctttgcaacagcatcagggacagtcaagcgtgtggctttatcacaatttgccaatctgcgtgctggaggcttacgagcgattgatctagcagaaggtgataccttaattggtgttgcgatcaccgatggcgaacaagagattatgctatttagtaatgaaggtaaagccattcgctttaaagaacagagtatccgtgccatgagccgagttgccaaaggcgttcgtggtatgcgtgtgaatctgcttacaacaattgatgaagaagagctgttggatgaagatggcgatgaagtcggcgatgattttgcggtgagccgagtggtgtctttggtggttgcacccaaacaaggtgagatcttgtgtgcttgcgaaaatggttttggtaaacgcacgccgattgatgattatccaaccaaaggtcgtggcggtaaaggcgttattgcaatcaagacctctgagcgtaacggacaattggtcaaggcgattgcagtgactggcgaggaagatgtcattttgatttcggataaaggcactttggtgcgtacgcctgtggctcagattgctaatgctggtcgcaatgctcaaggcgttaagctgattcgcattgctgatgaagaggtattggttggcatggcatgtgttgaacatgatgacgatgaaatcgaagagtcagaggtgttagctgatgtggtgcaataggcatctgagtctattgagtgaatgttcagccaagcttacgggcttggctttttggaattgtcaatcatgttgcatttatatcatttgaataactctcgctcttttagagtggtttggctacttgaagagcttaaattggcttatggcttagagtatcagctacatctgattgagcgtgatcaaaaaacttttttagcgcccaaaaatcttgagcagattcaccccatggggaaggcaccgattttaatcgatgacagattgcctaagggggagcaagttctggcagaatctgcactaattttatcttatttattaaaagcttatgattctaaagcgtatttttatcctgctgcagccaacccaaacgaacaagccaatgacaaagtatggcgtgattatactttttggatacattttgccgaagggtcattgatgccgcctttggtgatggggctgattttagataaagctcgccaaaaatctccttggtttgttaaacctgtactcaataaatttaactcaagcattcatcagattattttggataagaatgtgatgaatgctttaaagatgctagagacggctttggctgataagttatacttaacagggcaatttagtgccgctgacatacagatgtatttggcagtgtatggcgtacgcttgcgtggattgataccacaaacgcacaccaacacgcatgcttggcttggcacttgtgaaagtcgccaaggtttcaaatccgctatttctttggcgggttcacctttataattaggtaattgtcaaggagatgatggcgatgaataaaaataaaccagtcattttacaaaacagcggtgtcaagattttggtgggcgtgctatgtttattaagctttgtggcaggatattttgcccatcagtcacgccaaatgaattattgtaactctatcaatcaaacgcccatcgtccaaaacggtattgtgatttgccaactcaatgatccaaatacttaactatcaagacggtatagcatgcctttgatgggatttggcttattttgttaaaatttctgccaattgtgatttattatggatattatcccaatgaaccaatgcttgcaagcgtcttttataaacttctgataaaattaaatttttactgttagtttgttgtttaagcagaatatcttttaaggcggtgcaaatcagtccataaaatactggcgtgatggctttgagatcttgattggaccaagattggataaatctttgccagtatcgctgtatttgacttttgtgaacatcgctcaaagcagcaatgacaaaatacgcacagctttgaaccatttttgtatcatcttgtaaaatttcatttggtaatgtgctgactgtggcaatgatttcatctaataatgggcttttaaaacttgcccaattgggcagtttgggtaaactaatttcttgtcgctcaagatgattagataatggtaaatgtgcttgtgccatgcctgagtgttcgatgacaaatgccaaaggatcagatttgagcaaaatgggggtgtgaatcagatgcaatgcgatttcggtgattgcatcggcggcgtcgtggcggttatagttaattaactcaacttttgggctaaactgtccttctcgaccaatggcttttaatttttgataaatatcgctatttaaccaccattttaagctagagccttttggcagcagttcggtcagttgcctaagcgttgccatggcttgtgccttagattcggggcgtgttaggtcgtattgacttgccaaaacgccataaatataatccgataagctcaccgcaccctcgatagcatcacgcattacggctgccccatgagattttaggtaagtgtcaggatcgtgatgatcgggtaaagttaaaaatttaagctcacggccatcgtttaagatgggtgcggcaatttctagcgtacgccacgctgctttttgccctgcattatcaccatcaaaacataaagtcagctgattattatagcgtaacagtcgctcaatttgcttttcgttagcggcagtacccataggcgctaccgccccataaatccctgcttggtataaggcaataacatccatataaccctcaaccagtaggtagtttttggctttttgtttgcgtgattcatacagaccatataaaatctgctgtttttgaaaaacaggtgattcgcttgagttgatgtattttgggttttcatcacctaggcttcgcccagcaaagcccacaacacgcccttgattatcacgaatcggaaaaatcacccgatgacgcaataagcaaaaagtcctgccattacttttagatgattctcgaaccaaacctaatattttcaaaccctcgatatcttgggggaaaacttgctccaaatgctgccaaccgtcaggtgcataacctagcccaaaggtttgtatggtctcttcgctaagaccacgatctaaaaagtactgttttgcaaaagtaaaattgttaagcatcagctgataataatcatgcactgcggttagtagactgtataaatcaccttgtgctgcattgggcgactgagtcaaaatgggtgcttgagtgccataaagctcattcacttgaccagcatgatggcttggatcagccaatccagaataagtatcgtatgccgataaatcattgacccaatcggttgctggtgatgggcgtgtatcggactgatgatgaatgaagttttggcgactgctcggatctggcgaaggttgagttgggagcttggcaccctgagtcttaacggtttttttgtatttgaattttttttgatcagtgtcatctttgggcagctcgatgcccgtttgttcggacaagaatttgaccgattcaataaagctcatccgttcaaattcttttaaaaaagtgatcggattgcccttggcatgacagccaaagcaataatataagttggtttcaggattgacataaaaggaaggcgttttttcaccatgaaaggggcaacagcctttgtattcacgacctgccgctttgagcgtggtatgcttgccaatgattcccactaagtcagcttgactattgagctgctcaatgatggactcggggatattcatgtccaaaattccaattgatgtaataatctcaggcgaccatacaccgcctgagattataattaacataaggttataattaacaaatgataacttgcttaaaaactggcattagcgtggtatttgatttaattgtccagcgtctgcctctgctgatggcaagtctaaactgatggcagggcgatgatttgtaccaccagctgtaggaatttcttctgggacttgggttgtggcaggtaagctaatcgcacctgcttggttgatgatttgggtgcgtgttgcgccatgatattgaccttgatagttgtcaagattttcgctgacacgccccaaacgcccaaagcttagtgctgataataccttttgtgtgcgtgtcttggcacccgtatcactgaggcgtactgaaccatcttgattgagatattgcggataattaatttggagtaactgcttgtactgtttggcggtctcagtcaagccaagcttttgattgctataagccaaaattgcgatagcttctggcacacctgtggactgtggatagtattgaaacacccacttagctcggttggcagcagccaccatcgcatcacgcttgacataccaacgcgctgccgccaattcatgctcagcaaagtcattataaatggcaatcatgcgttgtgcggcatcggcaacatatggactatcaggatagtgcttaagcaggttttgaaaatctcggaaagctaggcgtagataagtcacatcacgatgagattgatcaaatctaaccaaacgagaagctttgggagcgccgcccatatgagtaacgccttggacatataacgcatagtctaccgagcggctgtttgggtatcggtgaataaactcttctgtactttgtagaactgcttcaaaatcattggctttatattgggcataaatgagatctagcagtgcctgctgtgcatattgacctgtcggataaaaggttcggatgttatttagtgcttcaatggcgttgcgattttgatttttatcaagtgcttcactggcttcttgataatatgcagcatctgttttttcagccgtttctacggtatcagccttgcggtcaaacagtccaatcgcgcttttgcaacctgtaacagtccaagtcggttgcctcatggcggcaatcagcttgttttgtgatttcataggaattctcatgaattggtctaaatttgggctagtttagcatgtttttatgggtctgacaatgaatgtctattggctgtataaacacacaaaacctatttaaaagattgcttggataatgagtaaggccagccaatttgatatattttggataaaagtaaaaatgcgttgatatatcagcggcctgtcttatcaaatttgataaaatgtgctaaagtggtctaaatttactcttgggctttattatgaatcatgatgaattgatggataacttggtcaatcaggcacctgactgcggcataggtgaggatagtgatgctgatgatctgattgatgcagatgagacgaccacccaaacaccgacccaaattcatctgacgcatagtgtcagtaccgagcaaattggcattaggcttgataagctttgtgcggatatttttggggggttttcacgcgcaaatttaaaaaagttcatcgatgagggtcaattgacggttaatggcaaggtggttaagccaaaatatgcggtcaaagtgggcgatatattaacgctagaagctgtccacgagtctcattcagaggatttgcctgaaaatattgatattgatatcatttatgaagatgaggcggtgattatcattaataaacctgcaggtatggtggtgcatcctggtgctggtaatcgtacgggtactttggtgaatgcactgctgtatcactttcccaagcaggcacacttgccacgagcgggcctagtgcatcgcattgacaaagatacaacagggctacttgtcatcgcacgcacaaaatcagctcagctatctttgattgatcagcttaaggataaaagcgtctaccgtcattatcaatgtattgctttgggtgcagtgcatgaagtgcttcgccatgctcaaattgatgcacccattggtcggcatagcacccatcggactaagatggcagtgaaacaaacgggcaagcctgctttaacgcacattgtcaatgctaagtatttgcatgagcgttacagtcttttggatattcatctaaaaacaggtagaacgcatcaaatacgcgtacatttgtcttatgttggtcatccgctggtcggcgatcctgtctatggcacatcgccgcgttcaggtttatccgacaggcaaagatgtgcaattttggattttggcaggcaggcacttcatgcatacatgctgggttttattcatcctgttactggcgaggcgatgaaatttcatgcaccgctacctaaagatatgcagcagctgattgagatcttaaacgatgatacccaatgaaaatatgacgctgcctttggatattctttatcaaaatgatgatgtgttggttatacagactcatactggtgtatctgataaagccgatcggctgataggtcatgatgataatcaattggcactttatggcaaatttaatatggcacttcatgtcaatgatatgccatcttgggtactgaatcgacgagccaggctacttgcttggctgtatgagcaggcaggtgctaatcaaatccactggctaaatcaagtccatggcaatgttgtgattgatgttgatcagacaagatcgcagtcgttaagcttggcagatgccttgatcactcagcgtgctaagacagcactggcgatcatgacagcagattgtgtgcctatagcgatatttgaaaaaaatggcagtacggtcgcctgtattcatgcagggtggcaagggctggccaatggcgtaatcgccaaaacagtcgctttgatgccaacttcttacaagctatttgctgtcatcggtgcgtgcatctcactgccagcgtatgaagtggatcagcacttagctgagcatatcattgatgaggcggtaacaaataaacttgtcttacttgataggcaggtgctgtttgatatgctgatcaaaccttctcataacagtgataaggcatatattgatattaagagattggctcagttgcagcttgaaaaatttggcataacagtgctaaacgataccgtgccatgtagttatttatcacctaaatattattcataccgtctccaaactcataccaaccgcccagcaatcggcagaatggcgatgcttatcatcaaaaaataaccgctgatttttatcgggatatttgggtaatgtatgattaatttggtacaaaattcaatattgatacaaaatatcaattacgcaggattatcaatgtcaataaatgccacatcaatacccaattgttgattgatgacttcaccgagtcgaatcacaccgccacgctctgtggcatgatggcctgcagcaaaataatccacaccaagctcacgcgccatgtgtgttgtgcgttcagaaatttcgcctgaaataaacgcatcacagcccatggttgccgcttgctcaatcatatcttgtgcaccgcctgtgcatagggcgattttatttagtcggcgattgccatcggtggcggcaatatgtaagggcgtgcgtcctaaaactttggtgattttatcggaaaattcggacgccaaaatagggtttgtggttgccacattaccaatcggatgcttttggttgggatacaatgcacccgtaatcgtcaaatcaagcatatcagccaaggtgcgattattaccaatgtcaggatgggcgtcaagtggtaggtgataagcaatcaatgaaataccattttgcataagtttacgcacacgcacgcctttcatgcctaccaaaggttggtcttcacctttccaaaaatatccatgatgcaccaagatcgcctgtactttggcttggattgcttgatcgattaaggcttggcaagcggttactccagtgatgatccgtttaatgggtctgcctgcatcaacttgtaatccgtttgggcagtagtcttgaaactcatgagcattaagatagttgtcacaaaacttaaccagagcttggacgctgatggttgtcataaattttcctatgctaaatttaaagtattgtattcgcttttgaacgattatgcaaatgtatagatagcttaagaaaccaaccgttttgcttgtattaagcacagtttgcccctattattgagctatcagcagctaaaagcgagtgccttaatgtcggacaaatcaccaaatcctcatttttcccctgagcaagtgcatgaaattactgagcaatttgccatcagtggcatgacttgccaatcgtgtgccacacgcatcgaaaaagtactaagcaaaaagtccgccattcatcaagcgacagtcaattttgcaacagaggtattgcatatctcttatgatgccaatcagaccaatcgtgatgaagtgatggcttgggtggcaaaaacaggctttgaggctgtgccaatggcggatcgccaagaccaacacaagatgccttgggatttgatgattctttggggattgtcattaccgttttgggtaggtatgcttggtatgttgtttggatcacacgcattgatgatgcctgtgtggattcagtttatcttggcaagtgtggtgcaagttgtgttcggtgcacgcttttatttgggtgcttgggcgagcattaggggcgggcttgctaatatggatgttttggttgcacttggtacaacagcaatttgggcatattcaagctatgtatggctgaccgatctgcacgccatgcatatggtatattttgaagcatcggtgatggtcattgcatttgttaggcttggtaaatatcttgagcatcgcaccaaaacacaaagcctaaacagcttaggcttattgacgcagctgattcctacagaagtcaatcggcgtatcgatgataaatgggtcaaaaccaacattgagcatattaaagttggtgatgtgctactggcgaatactggtgataagatcgccgtagacggtgtggtgcaaggcggatttggtgtctgcaatgaatctcatctgacaggtgaaagcttactcattgataagaatatcggtgatacggtgtatgcaggcagtagcgtagaagatggctcaatacactaccaagcagccgcaacaggcacaaaaactcagcttggtgatatgatgtcagcacttcaagatgcacaaggtactaaggcagatattgccagatttgctgataaagttgcagccgtctttgtgcctgtggtggtggcattggcaatgatgagttttttggtcaattatctacttggtgcagagtttgatatcgcattaatgcgtggcgtcgctgtgcttgtgattgcttgcccttgtgcgcttggacttgcaacacctgccgcgattatggcaggcatgggcacagcagcacgccatggtgtatggtttaaagatgcggtcagccttgagtctgctggtggcattgataccatcatttttgataaaacaggcacgctgactttgggtcatccaagtgtccaaaaaatccaatgcttaagcagtaagataaataaatcgcaggcccttgagttgacagccagcatagagcagtacgccagccaccctttggcaaatgccttggtggaagctgctaaagataaaaatttacctttatatgaggtatctgatatccaaagcaccaccggtcaagggctgatggggtatgttgatggcatcggacaactaaaagtggggacgcccaaatttattggtctagagacatggcaggcagatgatcagtggtcggatacaagtttggttgggttagccatagatgatgagccgatggcggtctttgggctaagcgatacattaaaggcagacgcacacagcatcatcagccgcattcatcatgatgggatcaaaacttatttaatgagcggtgatcgccaatcggttgtcgatggcgtcgcaaatcagcttggcattaccgccgcgtttggacaaatgtcgccacgagataagatgtccgccattgagacattaaaaacccaaggtaagcgggttgttatggttggtgatggtgtcaatgacgcacctgcgatggcggcatcacacgccagttttgcagttggcagtgccactggcgttgctaagcataccgcatcagcacgcttgttaggcgattcactcaaccatattttttatgcttatcgtatcgcgcgcatgactttaaccaatattaagcaaaacttcttttttgcactggtttataattgtatcggtattccattagctgcaatagggctacttaatcccatgatggcggcagctgcgatggcactaagttcaatctcggtgctgttaaatgccatgcgactaaagcgtgtacagcttacaccaaacgatatgcactcagataaatccgtgggctaatatcatctgctttgttgattgagcagagtggggctgagtttggctgataaaaaataattattcttatttatacaatatttgttataatagcgatattttgatcgaccaatgaatatcaggttttttatgccaaatttaacccttttcactcattttaaaaagcagcgtggctcaaccaatcagattttggcattgtttttgattgcgcttgctgtttctgcattgattgtcgctgtgattggctataaatttggctatcgtcaaggcatgcacagtgttgagcgtaccgtcttagcaaagcatgatgcagcggttaatgtcagtgagctgaccgctgaaaatgtgcggctaaagcaggagatgacaactgccatccaagagcgtgatatcagtcgatcgacattaaataatctgcgtacagattatgacaatctaaagaccaccaatttacaacttgagcaggtcaatgagctactaaaaactgcagttgccgagcagggcggtgtggcattatctatcatggcatcagaaatcatctctttaccaaatgatacctttgaatatcgctttgatgtgtccatgcttgatatttctggaaaagccgttaagatgattcctaaattgactttactaaacgaaaccagtatggttgaggtaccgcttgagccatcaagctatgatattcgtggtgtggcaaatattcgtggtcgatttatcatgcctgagggctttgagccgaagcaaatgaagctggagctggtcgctggtaatcaaaaagttcagcagttgtataattggcaaattggcaaaatcatcaccaatgcaccgccttcattggcacaaatgtcaaattcaaaccaccgaccaattgaaaaaagcacgcaataatttatgggtactttttatcacaaatacaggcgaggcagtggctttcgcctgttttatattaaccaaaattgaaatttccagcagcaatacgatatgacgaagcagtgcagcagttattttttgattaaggcagtccaagattttaaatcaccttccaaacatcggtcagataccgatgtcatcaccgaaaccaaaattcaagtcaagcagcccaagctgtacacagtgattatgtataatgataattatacgaccatggattttgtggtatatgtactcgttgagatttttcagcacaatattgataaggcgtatcagcttatgatgcagattcatgagttgggacaagcggcggttgccttgttgccttatgacttagctgagatgaaggtagatgaagtgacggcattggcagaacaagagtcttatccgttactcactatgattgagcctgcctaatttttagattttattataaggattattatgctaagtcctgaattgttaacgattcaagaatttatgctgaagtttgctaagcaacattcacatcaatttatcagcgttgagcatttgttgatgggtttattaaaagatgcgtttaccgtcagagtgcttgaggagtgcggtgctgacagtgaatttattttatcaagtatcaagcaatatcttaaagatttcatgcccaagcgtgaagatgtcgacccattgccaaccaaaagtctaaatcgtgtgatgcagcgtgcaatttggcaagtgcaagccagccaaacccagcagctggtcaaacccattgatgcacttgtcgcaatttttaaagaagaacgcagttatgccaatgagttgatccagtcttgtggcgtggatattttatcggttactcgtgcaatttcgattcatcagcgttctgcacatgacgcttataacggtgtcgacgagtctgccaatcaatcgacaaagcccaagcaaaatccactggatgcttatactttaaatcttaatgagcaagcaaagcaaggtaaaaccgatcctttggttgggcgggcagatgaaattgaacgcaccgtccaaatcctgtgccgccgccgcaaaaataacccgcttttggttggtgatcctggtgttggtaaaacagccattgctgagggtttggcgtggctgattgtgaatggcaaggcgccaaaaccgcttgctaatgcgacaatttatagcttggatatgggtgcgctgattgcaggtacgaagtttcgtggtgagtttgagacacgcatgaaagacttgattgatgagctaaaagatacaccagagtcaattttatttattgatgagattcatatgatgattggggcaggtgcgtccatggacagtagtatggatgtatcaaatctaatcaagcctgcacttgccaaggggtatattcgctcaattggctctacaacatttgctgagtatcgccaagtttttgaaaaagatcatgcactatctcggcgttttcagaaaatagacattaaagagccttcggtatctgatacaatcgccattttacaagggttgaaaggatattacgaagattttcatggcgtggcatacaccgaagatgccattgaggcggctgttaaattatctgtcaagcatattcatgaaagatttttgcccgataaggccattgatgtgatcgatgaagcaggctcttttgtgcgtttgcatcatgataaagtcaccaatcatagtcaaatggatacccaaaaaacctcatcatcaatccaagtcgatattgatatcatagaacaagtggtcgcaaaaatcgcacgcataccgcccaaatctgtctctcatgatgataagaatattttaaaaaatttaaacgctaatctaaagcagatggtcttcggtcaagaccaagccgttgatacgcttgttgatgcgattttgcttgcacgctcaggattaacccatcctgataaacctattggctcatttttattttcaggcccgacaggtgttggtaaaactgagatcagccgccagttggcttatttgcttggtgtgcctttggtgcggtttgatatgagtgaatatatggaagcacatacggcatcacggttgatcggtgcgccgcctggttatgtggggtatgatcaaggtggtttattaaccgaaaaaattcagcaaaatccacattgcgtgctactgttagatgagttagaaaaagcacacagtgatgtatttaatttgttgcttcaagtgatggaccatggcacattaacagataataatggacgcatggcatcatttaagcaggtgattgtgattatgacgaccaatgttggagcagatagcatcagccgccgatcgatggggtttacacagcaagatcatcatagtgataatcaaaatgccatacagcgtacatttagccctgagtttcgcaatcgcttggatgccatcgtaaattttgcaccattaccgcctgaggtgattggcgatgtggttgataagttcataaccgaattatatgatcaattgcttgataaaaatatcatcttatctgtggacgatgaggtgcgtttgcatttggcaaaaaaaggttatgatcgcttaatgggtgcaagacccatggcaagaaccattcaagagctactcaaaaaaccgctatcaaaactgattttgtttggcgatctaaagcagggtaaagaaggtgtgaaagtggctgcaaccatgaaagatggtgcgattaattttgagacaattgataccaaattgactggtaaaattaagccaaattgactataatttatttggatttatttattaactgattgat

SEQ ID NO: 32 - DNA, 62909 bp, Moraxella catarrhalis
ttttgtaaacatttgtgctatttttggtaaagtcttgccaatgcagataatttagaaaaattgtgtgaatcggtctgatcggcaaagataataacgcttaacggctgccttcttgggctgatggcataaaaatttatcaccacaaccaaactcaatcccaaatcaaccaagcggatatcatgtaaataagcttgatggatcacatgtgtatcttttgggtcatcttgagtggttgccgcttgttttgaacggataggaaaagacaacagccaaacgccatcaatctgacggctactcatctgacggatgcctgatctttgatgataagcataaaaaccaatcaatacgcctgtacatacacccaaactcgcccattgccaccatgacaagccgacagccaaacagatgagtagaaccaaaactatggtactcatccacagataccaccctgtgcgtgttggcacaaaggcagcatctaacaccaaaggatattgagaatagacgcccaaaatctgactgactatttaatcaggctagacagtgccagtatgacgaagtgatttcatcttgtcaatcaaagcagcaacacctgcctctgatggcgtttcttgacccaaaaaaaacaccaataaatctggatcttcataacttaacaatgtctcaaatgcctgctgctcatctgcgtctgcactcaaataatgcgatttgacataataatcaatataaaaatccaattctttgagaccacggcgagcttgatagatgatacggcgctgtgcatcagtgggctgaatggtcatggtgtttccttatgttattttgggtgtgcttagtatatcaaaattgcgttattattgatgataaatcatgataaattttcattagtcatgatttatcatcatttgggcatctgacgatagtatctatggtgatacaatgattttataataattgcttgcacaaaaagaggataaaaatatctataacgctaccttaagtctgccagcttttgacacatatcaagcaaacggttggcataaccccattcattatcataccaagcataaatcttagcaagctcacctgccatcatcaactgctgtccatcgataatcaaggaatggctattaccaataaaatcactagataccaaaggttcatcacaataatccatgatgcccaaaagctggttttgactggctgtcatcaatgcatctttaatctgatctaagctcactgttttgttaaatttgacagtcaaatcaatcgcagcaacattaattgttggaactcggatggaatgcccattaattttaccacgcatcagaggtaacactcgttcggtggcattaatgctactggatgttgtgggaatgatattatgaccactggcacgggcacggcgaaaatcacggtgtgcttggtctaatacgctttggtctgctgttacggcatggatctcagtcatcatagcactttggataccaaatttatcatcaagtacagataatagaggtactaaagcttgtgtcgtacaagacacccctgagataattggcaaatcagcatgaagcttgtgatcattgaccccaatgacaatactggcatcaacacgatcaaatggtgctgcaccaataatcacttgctttgcgcccgctgtgcgatggcgattggcatcggcataggaacgaaattgacctgtgcactccagcacaacatcgacattcagatctgcccaaggcaaatactttggctcatcacagcttagcaaaagaatctgatgtaataactcgccttttgtgatcgtcaaatatgagttatcttgattggtcgttaatgaaacctgtgctgcattatgatcaccttgatcaaaacgcccatgcgtgctgtcaaattttaataaatgcaaaagcatttggttatcggcaatatcattaatggcgacaatttcaatatgaccaaaagtacttaactgttgcagataagctcgaagtatattacgcccaatgcgaccaaaaccattgatggccaagcgtaattttggtacatgtgctcgatgatgtgggttatttggtatcacgatcagcgtccatctttgaggtatcaatatacgccaaagccaagcgtatttcattatagctatacttttcacgaagttcatcgtaaatgggcttaattttaaacccatcggcaaattcgccttgagcctccaaatgacgcatcgcatctttaatattggtgattacttcatcagttggacgataatcttcgatggcatcagcacccatcattttaccaatacttgccacatgattgatgatggttgaaacagccaaactacgcttagcagcaatctcttctaaatccatcttttgctgaatgaattcataagttgcatgaatggtactggttagcccattgctaagagtttgtcctgctttggtttgattttgtgcttttgttttttgaccaagcacgccttgttttttaagtgctcgatatttttggttggcggtgatgacctcaggattggttgtaccaccacacgcatgaataaaggcatcataaattttggcaagcatcgattcatcaaacaattcaaacgctttggcatgctcaaaagacagctcaataaatcgctgatcaatgcgttgcacccattcatccagcaataaacttttgatattaaaacccagcagttttagcccatctaatgaccgtaagcgagaaagtgcaacatagccttgccccatctcaaaggtcttagataaatcaatttcggcagcgtctagagtcatgccttgggacttatgcactgtgatcgcccaagccaaacataaaggcacttgggtataacttgccaatacagtgccatccttatcctccactgtccactcttcaggctctgcagcaacctctccaccagtattgagccgaaccaagggataggcggtttcagagatgtcagcatcagtagctttataggctttacctgatacaccaataaagccaaccacttcgcccatcgtgccattatacacacccaaaaggggcaaatttttgacaaacatgaccttagcaccaattgcaaccgtcagctcatcgggggcacgcacactctttgacagtgattcttgcaagggtttttcacccattttagcggcacgataagttatggtcttggcagtcaattcattgagctgtgtttgattgatgacatccacatcagcattatgcgtataaagtctggtgcggttcaagtcaatggtatgattttgggtggatgtcaggatattaatcgcctgctgtgtcaccgattggcgacggatttgatttaaaatatcattcaaagataagccaaaacgctgtttttcatcagtgcctgtttggcgatgctgctcggtgagataacagatttgaaatttacactcacaccaagcctgcgacataaaggcgtatttttcttttgatgtttcacccttatcgccaattggtggcagctgaaaaaaatcacctgaaaaaattacctgaacgcccccaaaaggcatctcattttttcgaaaatactttaaaacttgattgatggtatcaacttgcttactgtgaagcattgagatttcatcgatgatgagtaccttggtgtttttgatgcgttcaagatattcatcacgggcggcaagcctttgcagattgactttctcaaactcattttggataccaatgcccgaccatgcatgaactgtcataccattcatgtgcgttgatgcgataccagtgctggctgtgactgcgacagggatttgtcgcactcgcaaatattcaatgtactgattgagtacataggtttttcctgcacctgcttgacctgtcaaaaaaacattttgccctgtctttaaaatcgcaagggcggtctcttgtttcatagcgtcaacttgatttattgtatttgattaagttttttggagcatttgtcttatgcccccgtgatatcaacttatccatgaccaaagcacgctaaaagatgctttggtcaactgtcttagtctgataagtgtgcaattattcaggcttaaagctgtcttttaagcttacgatttgattaaatacgggtgaagattgcgtatgctcaacactatcggcaataaaatagctttcacgctcaaactgaaaccgctcaccagccgctgcttttgctaaatcaggctcaaccaccgcttgatatacagtcaatgaatttgggttaaggtgtctgttaatccaaaacgcatcagcatcagcccctaaagcattctgtgccaaagatgcatcaatttcatcttcttctagcaataaatggtcgtataaacgcactaaagctgtaacaccatgagtggcagaaacccaatggataacgcctttgactttgcgaccttcagggttattacccagtgtatgctcatcaatcgttgcaatcaattcaatcacattgcctgcatcatccgtcttatgctcattgacttttaggatatagctgttacgcaggcgaatctctggattatttggcgatagacgcttatagcctgctggcggctcaatctcataatcggtggcatcaatatagatggttttggtaaaaggaatttgacgctcccccatgttcaaatgcggatgcttcggctgagttagccaaagtgcttcaccatcaaattctgccagtgttttttcatttttaagctcattaaatttagagacagcatcatcaaaatttgtgatggtcacctttaaaggacgcaaaactgccatgcctcgagcggtcgtctcctcaagcgacttacgcacgctaaattcaagcatacgatgatctaccagcccctcagatttggtaatgcctatgcgttcacaaaaatccctcaagccttcaggtgtatagcctcggcgacgcatacctgccacagttggcatacgaggatcatcccaacctgataccacgcccatatctaccaaccgcttgagcttacgctttgaggttagagtgtggtcaatatttaggcggctaaattcatactggcgtggcggcacatcaaagccaactttttgcacgacccaatcataaaatgggcgatggtcttcaaattcaagtgtacataaagagtgggtaataccttcataagcatcagataatggatgtgcaaaatcatacatcggataaatacaccattgatcacccgtttgatggtggtgagcatgcataacacgataaatcacaggatcacgcatattaagattcgggtgcgtcatatcaattttagcacgcaataccgcttcaccatcagcaaacttaccttgtcgcatatcctcaaatcgagccaaattctcctcaatactggcatcacgctgtggtgatggcacaccaacctcagtaaacgagccacgattggcacggatttcatcaatgctttgtaaatctacatatgcatcgccttgtttgattaattggactgcccagccatataattcatcaaaatagctcgatgcatagcgtacatcgcctgcccattcaaacccaagccatctgacatcttctttaatgccatcaacaaaatcttgtttttcggcggtggggttagtgtcgtcaaatcttaaattgcacgcaccgccaaattcgtttgccacgccaaagtttaggcaaatcgatttcacatgtccaatgtgtaaatatccatttggctcaggagggaagcgtgtcaaaatgctgtcatgcttacccgatgccaagtcatcacggataattgtgcgaataaaatcatttttttcggttggttgtgtactcataattcattgtccatggtgatcagtcttaaatgccataattagattattttagcataattttaggtctttaagcatgattttataaatataaagcacccagaaaatcagtatcgcctttaaatttgcacaagcacaccccataaattttatgctataataagcaaaatttaatcccattcattgatattttaaggatactttatggatatgcctgttgtagaatttgatacgacttttggtcaaattaaaattgaactaaatgccgaaaaagcacccatcacggttgccaattttttggattatgtggagtcaggtcattatgatggtctaatttttcatcgtgtgattgatggctttatgattcaaggcggtggtatggatgcacaaatgaacgaaaaacgcactggcacaccaatcaaaaatgaagcagataatggactaaaaaacaccgtcggtagcattgccatggcacgaacttccgacccacattctgccaccgcacaattttttattaatgtcaaagataatgactttttaaaccattcaagcccaacaccacaaggttggggctatactgtttttggtcaagtgattgatggcatggatgtggtaaatcaaatcaaaggcgtgccaactggttgttttggctatcatgctgatgtacccaatgagcctatcgttatcaacagtgccaaagtgattaatcaataatatgctaaacgctgattatttttttaccacaagaccgtctgatattcaggcggtttttgttagtgatttgcacttatcgccaatgacgccaagactaaccaaggcatttgttcatctgctagaagacctaaaaaacttacccaatctcaattcattgtatcttttgggggactggctggatgcgtggcttggtgatgacacctacacacggttatcagacgaccaaaaagccatacattggctataccctgtcattacagcactcaatgccttggcaaataatcatatacaaatccttgtcatgcgtggcaatcgtgattttatgattcgccaaacactttgtgatacttttaagggcgtactcattcaagaaccctatcccatcaacacgaccaaacaccgcattcgcttggagcatggtgatgcattatgcacagatgatacgagctatcagcgttatcgtgccatcatcaatcaccctatgacaagaatgatgttaaatcaattgcccttagcactgcgtaaaaagctggcaaataatatccaaaatcactcacaccatcaaaaatctcataaaccgccaaagatcatgaatgtaaacccatcagcggttgatgcagccatgacagattgcgatattttattgcatgggcatacacatcgcccaaatgtacatcatcatggtcgcaaaatacgcattgttttgggcgattggcgtgatgatggtcgtcacattcatgccgaaattggattgatgattggtgaagatctgcagcttgcacaatttaagtatggttaagcttttaacagtgttaataaaaacaacatgttaataaaaagagcgtcatataatatacgctctttttattaaggctaagcaaaataggtatggatagatattagtgagcttttttaccagcttctacctgaatatcaatacgaacatctttaggcatacccatatctaccaaataattcatgccccatttggtgcggtcaatctttgtcgtaaaatcaccaccacaaacctcagtatttaacattgggctttgataacagttaaatttagtcgctgttaaagtgacaggatgcgttttaccaagcaaagttaaattacctgacactgattgtaactgacgatttttgcccgtccctttgaaataaaatttagttgacacaaaacgcatggttgggtgttgctcaatattgaacaaatcagccccttttaggtgttgtgtgaatagtgatgaagacgcagttaggctactaactgggatgctgatatcaatcgagcctttgcctgctgcacggtcaaactgcatcaaacctgataactcataaaagcctgccacattggttgaggtgccaaaatggtcaatgctaaaacgcgcattggtgtgataaggatcaagctcataagtcgctgcgttagcaaaacctgccaccgccaataatgcaattaaagataatcttttcataacatactccatatggttgttaatcaattaaatgagctaataattaaatggaccaatttaatatgattgattaaataatatctaaaataatctcaaagcaaattgcaaatttcacttactatcttaaccaaaatcatctcaaataacaagcaccactttgatgaaaaaattgttgccaaattttaaaatagttacgcaaaaacaaacttaaagccacaactttttaaaagttttaaaaatgatatttcattgattggtacattaaactgtcagacttactcaacttttaataaaaaatctcaatttttaattaaaaagtatatgaaaatatttatttaatatcaattaagcaatttgaaaaaatgtgcttgatagtggcgcaactctcgaatagaatcacggatatcgtcaagtgccaaatgcgttcctgttttttggtagcctgtggcaatatcaggacgccagcggtaacaaagctctttgatacttgaaacatctaagttgcgatagtgaaaatatcgctcaagctttggcatttggcgtgctaaaaatctgcggtcttggcaaatagaattaccgcacatcggcgagatacctgcatccacccatttagataaaaattcaatcgtctgtgcttcagcatcagcaagcgttatagtgcttcggcggacacggtcaattagccctgattgtccgtgctggtttttattccagtcatccatgcggtttaaaaccacatcactaaccttgatggctaaaacagggccttcggcaagaatatttaactcatcatcagtaacaatggttgcaatttctataatgtcatcttgttgggtatcaagccccgtcatctccaaatcaatccaaatcaatgcttttttggctttggctgaaggcttggggtgctgaattttaattttatcgttcatgtgcttattttctttttgaattttctttttgaactggctgttaactcacttttggcattgtatcacagtcatcacaatctcgccatcattggccaaaatttccccacaataaccgtacaaccatcgttttatacccaaaaatttgttataattcacgacttaattcgcattacaaccaacatccatgcctaaaaataaactcaaagcctggctgcccactcccgaaaaactacgcaaaaaccgtttgattgcggtctttgcaccatttttggcagaccctcgactttggcagataaatcgcagctctttggggcgtgctgtttatgttggcgtgctggcggcattttttcctttgccaggccagatgccgctggcattacttggcgcactattcacccgagccaatattcccatggcgattgccttgacttggattaccaatcctttaacagccattcctatcttttggctggcatattctttgggcgcaatgctcttgggcgaacccatcattggacttcgtgccattgggataattttgactgattttacactttgggtgactgccgatggtatcaatccattcaccgcacaccgtcatattttttcatggcaagccatggcaattgggctatttttatctgcgattacaaccagtattgtacttggcttggcgtttcgtgctttttggaattatcgcactattaaagattggcaagctcgccacggctataacgccaacgcccccaaatttaagcatcaaaaaggtcataaacagcgtgaacaagacctaaaaaccagatacaaccacccaaaagacgataaaagcgatcatttctccatttaaatagacgctgtcatcgtaatgctttgctgttttggcatggcatgatttgacacaaatcaagctacaaagctacttatattcatttttaaaagcatgtgctaccgctcattttaatatgaataattttcattggtatttatgagaattttggcgtataattttttaccaaataccttgtattaatgattcgtccataatcattgccctctctacagtctcagactaagccgtgattatttttatttgtgtgaacggtatttattctgtcaagcctaaaaaagccaccagaatttgcacaatttttattttttatgaagtgaaatcttatgaactactcagtatttacctcagaatctgtgagtgaaggtcatccagataagatggcagaccaaatctctgatgcactgcttgatgccattttaacgcaagataaagatgcacgagttgcctgcgaaactttagtaaaaactggtgctgttgtcttagctggtgagattagcacccatgccaacattgatgttgaaacgattgtgcgtaatacagtcaataaaatcggctacaatcattcagatttgggctttgatggctcaacttgtgcggtgattaacatgattggcaaacagtcacctgaaatcgctcaaggtgttgatagacagcgtcctgaagatcaaggtgctggcgaccaaggcttaatgtttggctatgccaccaatgaaaccgatgttctaatgccagctccaattcagctgagccatcgactgatggagcgtcaagctcagttacgcaaagatggcactttgccttggctacgccccgatgccaaagctcaggtgacattgcgttatgatgaacatcatcaacctttggcggtagatgcactggtattatcaacccaacacaatcctgatattagccaaaaacagctccaagaagccgtcatggaagaaatcattaaaaaagtcattccatctcagctattacacaaagacacactatatcacatcaatccaacaggtaaatttgtcattggtggacctgtcggtgatgcaggtctgacaggtcgtaaaatcatcgtagatacttatggcggtatggcacgccacggtggcggtgcttttagcggtaaagacccatcaaaggttgatagaagtgcagcctatgcgggtcgttatgttgccaagaatattgttgcagcaggtctggcggagcgttgtgaggtacagatcagttatgccatcggtgtcgctgaaccaacctccatttcggtcaatacatttaatacaggtaaaattagcaacgctgatatcatcaagcttatccgaactcactttgatttacgcccttatggcattactggcatgcttaatttactacagccaatgtatgaaattaccgcaagttacggtcattttggtcgccaaggcgtagataccgcttttacttgggaaaaaacggataaagcacaattgctgcgttctgctctttaaattgttggataccgcccttttatttggcacaagacagcgtcaataaagtctgtgatgatgaccaatctttaagtaatcatcaaaataaatcggatagccttgatatcaaggttgatttgatatcaaggcaattttgtctatttgcgatgcaatttatctctatttgctatgcaatttatcaataatagcccaattcaccctgctaatttaggataaaagatgagtgacaatcaagaatttaatgaatcagaatttcaagatcaaatgcatgcattttttgagcgtgctgatgccgtcattacgcttgccaacagccagctttcgccatcatcgcacgcagggcaagtggcagccagcctaaattatgcagcggcaagatttgccatctcagcggcaaccatcggctttgtcaagggcagtgatcttgccaaagaaaaagatgacattatcaaattttataccgaaaaatatcaacaaatgctcgctgaaaacttagaacagtatatcgaaaactttgaccaatacactcagcttgccaaaaacaatcccaatccatctttgtgataccatcaaaaaaagcaggcattttctcctgcttttttatcaatgatacatcagattaattggcccattgaccacttttcatctcaaggactttatctgcttgggatgccaaatgcctatcatgcgttaccattaataatgccataccaaaagatgcctgaagctcactaagtagctcaaaaactgcctgtgcattttcatcatctaagttacctgtaggttcatctgccatgactaaggcaggtctcgtaaccaaagcgcgtgcaatggctacccgctggcgttcgccacctgacagctcgctgggtcgatgatgcaatcgatgcccaagtcctacccgatgaagcagtgcatttgcttcatcggttgcctgcttgatacttacatcacgacgcatcagcaatggcaaagccacattttcagtggcattaaattctgccagcaaatgatggaattgataaataaatcccaaatagcgattacgcagctctccacgcttagtctcattaagatgggtaaggcattgcccttttagccaaacctcgcctgtgcttggtgtatccaatccaccgagcaaatgcagcaaggttgatttgccagaaccactactaccgacgatggcgatgcgttcacctgcctgaacttgtaaatccaaacctgatagaacggtggttttaattttaccttcatcatacactttgctgatatttttggcgtgtaaaatggtcgtcatgctaatccttattcatatcttaaagtttgtgcaggctgaatttttgacgcccttaacgcaggataaattgtcatcaaaaaacttaataaaaatgatgccgttgtaattaataccacatccacaatttcaatcttagagggtaaaaaatcaacagcatacacactgccatcaaataaacttacgccaaaaatacggctcacaaataataaaatatcattaattgataaagccaatgccacgccaagcactgtaccaacaactgtaccaatcacaccaataatcatgccttgtaccataaatacttgcataataagcttgggtgatgcaccaaatgtctttaaaatggcgatgtctgattttttatcagtcaccagcataacaagacttgagacgatattaaatgccgcaacaaccacaatcaaaaacaacaaaagtccaatcattgctttttccatttggatggcactaaataaattaccgtgtgtggttgtccaatcgcttgggaataatggcaatgagtcaatgcccgctgcattatttgccacttgaggtgctttaaaaatatcgtttagcttcatacgcagaccttgtgcaccttcgggcaaccgaagcatcacgccagcatcacgcatccgcacaaaacccatcatgccatcaatttcgctgctgatatgatatacccccaccaaagtaaaccgcttaaatcgtggaataacgcctgctgctgagggtgaggcttcaggcaaaaccaaggtaaccttatcccccaacttaagtcccatgtcagagacaatggactcacctaatataataccaaactcgccgatatgtaaatcatccaaattgcctgcggtcatatgctcatcaatgatagaaacttgcttttcgtaatcaggctcaatgccagaaaccacgattccagtcacctgaccttcagcggttaacataccttgtagttgaatataaggggcaactgcttgcacttctggattttgcattttgattttttcggcaagttcttgccaatttgtcaaaatttctgttgaggtaactgaagcttgaggcaccatgccaagaatgcgtgatttaatttcacggtcaaagccattcatgaccgacaaaaccgtgataagcactgcaaccccaagcgtaagcccaatggttgagataaaagaaataaaggaaataaagccatttttacgcttagctttggtatatctaagcccaataaataacgccaagggacgaaacataagctgtgttccaaacgacccaaccgtgctagtttagcacttttttggacaaataccaaacatcacataacaaatgaatcatcaggttggttttgttgcgcttgtgtatctgtatgataagtttcttgctaaaacagcttttttatgtcagaatacagaaaaggtatatacttatatttttaactttaaatagatctgcttttttataccgatgatttggcatgaagtttatcggtctgatatgctggatataagtttatcggcttgatataaattttaattaatcatcaaatttttaaggaatttatcattatgaatatgaaatcatcattagtgctagtgatgctggcaggcttatcattgagtgcatgtaataaaaaagaagaaaccgttgttcagcccaatgaacctgttaccgccacagctgatgctgctgtcgttgatgctaccgctaccactggtacgcaccagcctgaggttgctgttgttgatggtgtgggtgttgtattaccacaatcaacttatacaggtactttgccttgtgctgactgctctggcgttcaaactgacctaacgcttaactctgatggcacatttgtgatgaagcaggattatttgggcaagccgaacggtcaagtaaccactcaaggtacttatgacatcaatggcgtggataatcaatatgtcctactacaccctaatgatcatgctgacacgcctccttatttgatttatatggataaagacagtgttcaatttcgtgatttagaaaatggcgaaacaccgacacctagccacaccctgcttttggtcaatccttaaattaagcaatcaaatgaataaaaaaacctgtcaatgcgtggcaggtttttttaggtaatgactgttttattattttgatattttactgtctttaaaaatgcgtcattgactaaacggtctttttagatagataaaccaaaaatgacgacttaacatagcgaatgaatgatgataaaaaaatccgtgcttgttttacttagttttttggcatttgccaacacatcgcccagctatgccattgatgagctggtcattgcccaattaaccaacccatcagcagccaccgatgacaacaagcctgccaacaatgctgatgatacccccattgccagtcaagccacgccgattgatgatgcccaaatttatgataggatttatggcattttttctgaagtagatggattatcatcggtcaaagttaccgttaatcaaggtgttgtcaaattatctggcgaaaccgctaacgaaaaaaaagccactcaagcagtcaaattagccaatcgtatcagtggtgttgtcacggtagaagatgacatcagtcgtactttggatatccaagataatgtcacgcctgttgtgaatgatttggtcaatcaatcaaaagcaggactaaaagcattgcctttattattggtggcattattggcatttgccttggtggcatggcttggcggctggctgtctcgccgtgaaaaactttggcaacgcattacgccaaatccttttattgcagaacttttggcccaaacagttaaagtcatttttattgtgctaggtttgatactagccttgagcttgatgggtgcagaagccatcatcggtacgcttcttggcggtgctggggtgcttgggattgcagtgggttttgcggttaaagataccattgaaaactatatcgcttctttgatgctgagcattcgccaaccgtttcgggcaaaagaccatgtggtcattaacgatgaagaaggcattgtggtacgattgaccagccgtgccaccattttaatgaccttagatggcaatcatttacgactaccaaactcagaggtatttaaagcaaccattttgaattataccaaaaatcctgaaaggcgttttacctttgagctgggtgtggatgccaataacgacccattagcagcgattaaagtggggctagatgccatttatacactggattttgtcctaaaagaacctaaggcggttgctgttattaatgaggtgggcgactcaaatattattcttgagtttagagtatgggttgaccaaagtaaaacagacttttcaaaagctcgcagtatcgccattcgtgaaaccaagcatgctcttgaaaatcaaggctttagcttacctgaaccaatttatatgctaaactttgatcaagcattagaagatgcggttatcaatcttgcaacccatcttgtcccaaccgccccatcgcccaaaacgacgcctaatatttctatcgatgacaccgccccaatcggtgacaccgaacgccaaaaacaaattgccaaggtgcgtgccgaaaaaatactcaatgaaaattgcatgaatgatattttagataccgcacccgatccagaaatatggcacagagttgaggctgaaattcgcaatcgttcaggcgaaaaagatctattgagtaataatagcccacaagaataagcgttcattgtttcaagtttattggtgttattgctgatctgatatcaatgattggtcatcttgacttcctcccctccctaaagtgaggggattccttctacaagacggtcaagcccgaccgcaagaatgttccgactggcgttaaatctgaatcatgccgtgtgccacactttgcacaagtccattctcttattcgcaaacctgctctacctttcggactgttgctgtcaatttgacggcaacacgagcaagtttgggtagtgtatttctcattgacgatttcaaaacgacaacctgcatgcttgcatttgtattccagttgtcgtttgagttcaaaccatcctgcatcataggttgattgtgccagtttggttttcttgttcgtgaatgagcgtgatttaacgtcaccaaccacgattagggcattgtctttgactaattgggtggtgaatttgtggattaagtcttggcgtgtatttttgattttggcgtagattgcccgtacacgcttctttttacctgcacgctgagcaatggctaactctttggcatattttagggtttgtttgatggtgagtttgccaccttttgaagtggtcgcactgtcttttaaacctaagtctatgccaacactacccgtaccgcattgtgttttagggtattctttgacggtgatgcaggcataccaacggttacggctgtcttgtactatctcaagcgtgttgatttgatatagacttaggttgtagccatcaaagacatctatgatgagcttttgacccttagagagcgatagctgtaggttgatttaagtgcttttttgcctgtttgtcttgtgcttagatacttaatagcagactttttaaagggtatccagcctaggctcttgtgtttggcattgggtcggttggtttgccagttgagtttggcttttttaaattgctttcggcttttggcatgggtttcgttgatggcttgaatggtttgagagtgtaagcccaataactcaccgctgcctttggtatattcgtttaggtcgtaagcactaaagaatttaccagtcttttgtaggtacttgtaacccaagtcattgacataattccacacgaaattgaccgaaccgcttaggcggtttagttggtttgtgtgtttgtctttgatgcgtagcttgagtgttttcatgggtttgagtatgattggatttttctattttacagttgtctaattgtatgtcaaatgatttaagatgtggtaggcacgttgtttacaatctgcatgtaaatttggtctttgtggctaaatatcgtagaaaagtgtttaccaaagagattctagacgatatgcaaggcatttttgaggaagtctgctcaaagtttgaagctcaattggtggagtttgacggtgaatgcgaccatgtgcatttattggtggtttatccgcctagggtggctatttcaagtttagttaatagtttgaaaggcgtgtctagtcggcttattcgcaaaaagcagtatccatctatttctaagcagttacggggtggtgcgttgtggtcgcctagctattttgcaggtagttgtggtggtgcggaggtggagattatccgccagtatatcgaacagcaaaatacgccacactaaacagcggtcgatgcgtaagcataactatttaagttgccttatatccaccgcccaaagtcgcaggtttacggcaacggaggataaaaaagggctgatggtttcagccctttttgaatttttagtttatttgcttgctagccaaaaacgcccatggtattggcaacatataacaaagcaaatccaagcaaaaacatcaaaccgatgattgacaacgcttgaatgccggatgacagcttttgttctgagcgtaccaaagagtagtttagccacgcaaaaacaggtgcagacacaaacgcagaactcatggcaaatttgagcatattactaagctgaccttcaaaaaaagcaatgataataaacccaccaaacaccgcccacgatatccaaaatatcaactgaccacggctgatttcatgctcaccctttatcaatcgccagcattcagcattggcacgcccataaccgtcacctgaggtgagggtggtactaaacatacacataaacgcaataaatgccaccaacaaccgtgaccattcaccaatggtggcagtgtacatgtcaatcaattgcccaacataagcactgccagcggtttgaatctcttgccctgaaccgtactgaacatacacacccaatgccaaaaaaagcaccgctaagatggttgatgtggcgaaacccacattaaaatccaatcgtccttgttcgtgagtggtgtggtcagtttggatttttttagccgtccacatagaagtaatcacagaaaattcaagcggcgcaggcatccagccgaccaccaccacaataaagctcaaacttgccagattccaagggctaggctcaacaaaatccaccgccatgacggtgggtttgcctgctgcgataaacaccgctgcaaccgtggttatcgccaacgccaaaatgatgattttggttatgccatctaacacattgtaacgcccagcaatcaacaacacccaagaaatcgccagcacaatgaccgacgctgttaaaggcgttagacccaaacttggaaacataaaggttaaaatcaccgctgacatgagcccaaccgccgccaaagtgatgatggaggagatgactgataaaataaaatacacccaaagatagactttggattttttggcataacctgcaatcagactgtcgcctgtgtcatacacataatcgatgccaaaacgaaaaaaaggatacttcagcacattggccaaaataatgacaatggcaagttgccagccgaataatgcccccgcttgtgttgatgacaccaaatgcgatgcaccaatggcagccgatgccatcaaaattccagggccaaaggccttccaattaatcttactaatcctaccaagataatggctttttatttgagtggtcatgagtgttcctgacgataactgtggtttgataccatggttaaagataaattttagtgttgcgaataatgaatgatatctttgtggtattaaatgatttcatttattaataccatgttgctgcactttgtacttttattagcatactttaccatcaaattactgtattgactaatgaatattatttcatcaatcttgaaaaaattttagtgtgtatctgtccttaatacctgccaagcgcttgagattttttaaccaatccccatgtagataaacagttatctatgagtagtgattatgaacaatcagaccattcgttataattatacgcacgaaacctcccccaccaaagttgatttaccccatgatgaaaatgccagccatggcgaccattgggcaattttgaccaatgacattacccaagatgtgccaaattggttacaggcaatgttagataaagcaaccttacccaaaggactttgcccacaaaatagtaccaataatgccaaactacttttgggtatgaatgaaccttgtcatatcaaacaaatcttaaccatcaaaaacggttctccccaagcttttattaatgcctttcctgcggttaatagcccctatggtttaacttgccaaattgagcgtatcattcgctgtgataccacatcagatgccattttgtgcctaaaaacgcctgatggtgcggtcatttatgcatttgaccaactgtatgccgtcaatcgcacagagtatcgtacacccaaaaaatactttgttaattttagtgcattggcgtatcatatcaagccaagcaaccaagaagaaacgattgtcattgaagaccaagaagccattcgccaccaccgcgcttttaatgatattgtcgcaaaaaatggcggtcaaatccctgatgatattgatgaaaaaatccgtcaatggcaaccaacagaccatgaatctggtaagccgtttgcacctgttgagattaatttggggcatatgtgtgcttatttatacggtgaaacctttggtcaagaagatgaagcttggtgtcaagggcaggttttgggcaaatcaagcacagaattttttggcaaaccgatgactttatttgatgtggtcattttgcgtgaacctgatgccgacccgtttgtggtgcgtattgcagctgtcagcactgagcaaacagacgccattcaggtgcatgattatattcaagcgaatatttggctacaagccgccatctatgaagccaatcaaaaaccgcatcaaaagtagccattcacttaaaatcacccatagcaatacctatattgcataagtattgttatggatttttatcatctgctcggttaaatcgtatcagcttttaattaaggcatttagccaatcgccaatatttgttatttgtggcaaacagacctgatgtgccatgggataagtggtataaatgggagttaagccaagtgattttaagtggtgcatcgcctgtatgcccaaagttttggggacaatgtcatcaaattccccatggtcaatcttaacagcaacatgatgatttactgggattgattggatgtgttcaaatgtggcaaaataagttgacagtgccaaaagtccgcccagcttgcgtgaattggttaaaacattatgatacgccaccgcacccccttgtgaaaatcctgcaatgataatattttggctatcaatacctttggcaatctcatcatcaatcaactcatcaatcatcgcacttgaagatatgatttgagccacatcgactttacgatttaaactcatctccaaaatatcataccaagcaggcatgacatagccgttattaatggtgacagggatttttggggcatggggaaaaataaaacgaacagcagtatcttttgccaaaccaagattaggcacaatcggttcaaaatcatggccactggcaccaagcccgtgcaaccatatcaccgtatgcgtgatgggctgagcagatggattatgttcaaccactaccgaagttaattttgacatatatcagttccatattgcataaactaagttggttcatcatacgatgattaccaataaattgcaatcaaatcaaagatgccaaacgctcatattgatgctaaattcttaggtgataaattgatgattttgccagatggtgatatgatatgggcataacccatcaagcgtagtgagccatcgatgagatggcttagaggcgtgttaggttaattaatatcaatgatttgggataacttatgcagtggcgtggacgaagacaaagcaacaatatcgaagacagacgcagcggcggcgtcaaaaaagtcggcggcgtgagtatttttggcttaatcatcgccatcatcttatggcaggtatttggtatcagcccagagaccactttgggtgttgctcaacaaattcaaggacaagcaaccacagcccccactcacgaaaccgctgatatggcagaatctaaagcgtttgttgccacaattttggcagatactgaagatgtttggacgccaatttttgcccaattaggacaccactatcagccaccaagtttggttttgtttagcggtgctgtccaatctgcctgcgggtcagccacttcagccagtggtccattttattgccctgctgaccaaaaagtatatctagatacacagttttttcgtgatatgcgtacacaaatgggcattacaggcgaaaaaaaccataccgaactgacacgccaagaccaagccgctgattttgctcaagcgtatgtcatcgcccacgaggttggtcatcatgtccaaaccttgcttggtatttctcaacaagtacaccaagcccaaataaaagccaatcaaacggtagccaataatttatctgtacgcttagaattacaagcggattgctttgcaggtttatgggcacgccacaatcatgagcgtacacaatttttacaacaaggtgatattgaagaggctctagatgctgccgaaaaaatcggtgatgattacctacaacataaagcccatggccatgccgtcccagatagcttcactcatggaaccagtgcccagcgtaaaaactggttttataaaggctttgaaacaggtgatgtgcatcaatgtgataccttttctgcagaccaaatttaatctttcatctgacattatccgacggaatttatatgcacctgcctgatcatctgatccagctactcactcaatatctgaccgaacacacccaccaacccatcatcatcgaccctgcggttttggcttatcggtgggttggcggtacatcaggcaatcttgagccgattgagatcagctttggccgtagtttggtggatttgcttggcattgatacccaaaaaactaaactcatcaacaataccaagcagtttttggctcacctgcctgccaatcatgtactgatgacaggtacacgaggtgcaggcaaatcatcactggtgcgggcattgcttcaggcttatcattcccaaggactgcgtgtgattgcggttgccagagatgatttaaaacatcttggtaaaattcgtcatgccatcaaagagtcggtcaatcaaggcaataccaatcgctatcttgtttattgtgatgatttggcgttcaatgctcaagatgagaattaccgcaccctaaagtcaatcttagatggctcacttgatagcgagcatagtcagctacttgtctatgccaccagtaaccgccgccatctattgccacagatgatgaaagataatatcagtatttataatggtcaaactgatgaagtgaatccttatgaaaccattgatgagacagtatctttatccgaccgctttgggttatggctatcatttcagccaatgaaccaaccgttatacttacaaattgttgagcatgaactgacaaaggccaatatcgtctttgatgattttgcccaatctcaagccttacaatgggcgggcagtcgtggcggtcgttctggtcgcatcgcatatcagtttgctcaacattggattggtcaaactcgcctagcccaaggtgttagcggttgatatatcaacttaatattttatggctttgatactaattacgatactaattaccgataatatttctaaaggttaaattcactcggctgcctagtatctttttttgcttaggaacgctgtgctgccaaaaatgctgcaactgacctgccatcaccaaaatactcccatgatgtaaaagtagttcaagcttaagcgtatgattgtcgcataaacgcagtaaaaaccgccgagactcaccaaaatttaccgaagcaatcaaggggttgttacccaattctttttcgtcgtccttatgccagttgatataatcttcacctgagcgataccagttcatcaatacactgttaaatcgtcttttgcatatttttccaagctcatcattgagcatgagcaatcggtctgtccatggatttgggtttagggtgatgccagaataagtataagggcaatcattatcgccataccatgctgagatgcgtggtagcttgtgtactttaccatacattttgatggtgtcttgttgccaatgaatgtgacgaaactgcaccatattcaaatcagtatgatgccagttgtgtgtgcggtgattgatgggcttaccaccgatttgactttctaagaaataatccaaatatgcatccgctgtctgctcatcaaaataatgcggggcgtaatatagccgaccataaggaacaataataacaatgcctttgccatcttcatggcgatgagcatcaaacggtgtatccataaatctcccctgacaaatcaagtccgctgccagctcattatcctttggggtttttaaatcctttaagatattgccatcacggtctttgatgacatgcaaataatcatcactgtcatcaaaattgatattggcaagctgcggatattcttcttggaattgagcaaatttagagccttgtttttcactaaacaaacgagagcgaatttggtttagaccatcatcggtacttaatacatgaatctcatcaggaataaagcgttcttgatggggtaactcagggtcacatgccaatgcccatatcgtttcggtgataatttgtggcgtcatccctgtcaccaaaaataaaatctttgtcatcacaattccttaatattattaaactgatttcaaaagataagacacataaacacaatcattaacacaatcatttttttaaatgattcatattcatccaaaaccttgtttgtccatcacaataatcacaggcaatcttggtctcaatgagtgttatcgtaccaaagtcagttatggcgatttatgtattagataatagatcttttttgaccaaaatactcattttataagcttatcaaaacggcttgttcggtttaatatccgcctgatatgtcattatcagataagtttgatgcataagttatctgatgattctgtgggcaataaaataagccataacagtcagttacggcttattttattgagcggtttgggattatctgctccaaaccatcactcagctgatttttgatgaatgggttttttagtttgctgagtcaaaacgcttttgtgcttcgtcccagttaaccacttcccaaaaagctttgatataatctgggcgtttattttggtattttagataataagcatgctcccacacatccaaaccaatgataggatatcccttgcagcctgcgaccgcttcacccatcaatgggctatcttggttggcggtcgagacaacttttagcgaaccttcatcaagtaccaaccacgcccaacctgaaccaaaacggctggcggctgctttttcaaactgttcttggaatgcttcaacagaaccaaaatctctcacgatggcatcttttaatgatccgcccaaagtcgtgcctgtttttaaaatggtccaaaataggctatggttggcatgaccaccagcattatttctgacgcctgttcttttgtctgctgggatttggtcaagatttgcgataacctcttcagcagatttatccgcccactgagtaccttcaagcagaccattggcgttattaacataagcttgatggtggcgtgaatggtgaatttccatcgtttctttgtcaaaatgtggctctagtgcatcgtagctgtagcccaactctggtagagtgaatgccattgcaattttccttcttttgtgggttataaatgtcagtataataggacaaatcataaaatcatcgtccactatcactataaagccatcatgggataaattcaagcaaatttacaaatttcacactcaaccacacccaaaaaacccaaaaaacccaaaaacccaaaaaaaaataatccatgactggtttttgtcagttaaggatgaattggcaggtggtggtgaatatatggggcatttttgttattaatttttgtcattaaatatgagtaaaaatacccaaaaatacccaaaaatggtgtattattaagtatactgtttgatcgtgtattaagacatacaaacattaaccaactttataactttaaccaaccaaatcacccaagtgagttaaactcaccttaaaaataacttgagcagacacatgacaaccaatcaccaaaatgaccaattcaccaatccaaatatcctacccactggcacgccccaaggtcaaagcgaacaacaacgcccccaaggcgaaaagccagccgatgacgagacgacccattttggctatcaaacagtgcataaatctgaaaaacaagccaaagttgccgaagtatttacctctgttgcccgcaaatatgatgtaatgaatgacttgatgagctttggtattcatcgcctatggaaacggtacgccatcagcttgacaggtgtacgcagcgggcaaagggttcttgacattgcaggcggtacaggtgatttggcgaaggtgtttagtcgtgaggtcggtcgctctgggcgtgtggtgttgtctgatattaatgaagcgatgcttgaggttggtcgcactcgtctgattaatgcaggctgtcataatgttgactttgtgcttgccaatgccgagacgcttgagccttttgaggataatagctttgatttggtaaccatcagttttgggctaagaaatgttaccgataaagataaagcactctctgccatgcaccgtgttttaaaaccaggtggtcgtctgctggtgcttgaattttcaaaacctgtatttgagcctttgtcaaaggcttatgatttatactcatttaccgccctacccatcatgggtaagattgtggcaggtgatgccgaaagctatcagtatttagccgaatcaatccgtatgcacccagaccaacaaacactcaagcagatgatgcaaaatgctggctttgtcaattgtgattatcacaacctaacaggcggtattgttgcggttcatcgtggatttaaggcacgctcatgatgattggggtgctgtcgcttgctgtgggtgaaaagctggtcaataccgccatcggcctagacccattgatacagtctgaattaaaaaacttatcaggtaagacgctgcgtgtgatgatgcggtcaccaaatctatccgttgatgtgttatttggtgatgagcgtgtgcgtcttgaacctgcttttgagccgatttttgagccacaaggcggtatttatcccaatccgcctgagtgtaccttaacggttgataatcccaagcatctattagccctccttcaaaatccaacaggcaatttgccaattcaaggcgaccatcagattttaatgcgtgccaaatacatgcttgagcaatgtcatcctgacatttggtcttggctagagcggttgattgggcaagatgcggttagtcagttgtattttattggtcaagagatttcccctttatcagcccccatcatcaatcacattaagcaagctttggcaagctttgtatcacaccaagtatcttcaaatgaaagtagctttatcgatcagacgcttcaggataaaaaacaaaccctgcttcgcctacaaagtgagattgaacgcagtcaagccaaattagcagaaatccaaaatacccttaaacaaaataactaaaaactaagccgcccaccgatatgcttatcactcatcgcaaacgcttgttgtcattataccgcatcgcagccaaatatcgcttggatacacattttgctgatgtgccagaatttgcacccattgctcgcctgcttcgtgtgcatcctgcaagcttcggtcgctcacatcagcctttgggcgtcaagcttgcacttgaagaaatggggacactgtttttaaagttgggtcaattattatccactcgttctgatttattgccaccacagattatcgcacaattatccttattacaagataaggttgccccatttgatgccaaaacagccattgccaccattgaacatgccaagtacggcttaggtcagccgattggggatatctttgctcgctttgatgagatacctttggccgctgccagtgtcgcacaagtacacactgccgccttacatgatggtcgtgaagtggttgttaaggttgtccgccccaatatcaaacaaggcatcatcgcagactttgagctattacggcaaatggcggcttgggcatctgcacgccttgaagcggctcgtgccatccatctgattgatgtggttgaagattatcgccaaattatgctcaatgagctggatttgacgcttgaggccgccaacagcaccaaaatgcgtcataattttacagactctcggctgatttatgtacccgaagtgtatatgagtgccaaacaggtgatggtatctgaacgcatctttggcgtacccatctcccaaactgacttatttgatgcccttggttatgaccgtgctgcactggccaaaaaaggcttgaccatcttttttacccaagtatttcgtgataacttttttcatgccgatatgcacccaggcaatatttttgttgaaaccatgcctgatgggcgtgctgttgccgaaccacgctatattgggcttgattgtgctattatgggtgagctgtccaaagaagatcagctgattgttgcacgaatgctgttatcagttatgaatgccaattacaccgcactggtggatatcatttggcaagcaggctggataccaccgtcagcggataaatatgcactgatgcgtgatatgagccgtaccgtttcgccaatggtgctaaagccgattcatgaaattgattttgcaggcgtgctatttgaaattttatccattgctcgccgtcatcgcatgagcattccaccgcagctcatgctactgcttaagacgctggttcatgtggaggggctgggtcgtgagctgtatcctgagctggatatttggtcacttgccaaaccaattttaaccgcttgggtcaaatctcaactagatcccatcaaaaatatacaagagctacaagctcgcctgcccgaggtgctgctgtctaccacagacttacccaagctacttaaccaaagtctacaaagcttagccactttgggtgctcatcaagatgccctattacatgagatacaatcgctccgagccgatggactcaatgagcgtcgccatgactggattgctttggctgggtttatacttatgctggggatggcgtggtggtcagcattggcaattcatctatatctagccccgatattttttatactggcgattggggtgattctgtggcgtgtgctgctgtaaccgactgatatcactatgaaaggaagtttatgagccaaaatctttggacgcatattcgcactgtgtcagattttccaaaggcaggtattgagttttatgatatcagcccactacttaatcaacacctaaatcagctgattgacgcattgattgatgcgttgccaagcgacatactggcggcaacggatgccttggttgcggttgagtctcgggggtttgtgcttgccagccttttggctgctcgccttgataaaggtttgattctcatcagaaaaacaggcaaactcccgccccctgtccatcgtgaaagctatggtttggaatatggcagtgatacgcttgagatcagctgcgaccttgaccctgccaatgtcttattggtcgatgatgtgcttgccacaggcggtactttggtggctgccgataagctttgtaaggcagctggcttaactgcccttgggtcgttggtattgctagatttgactgagctgcatggtgatttgggattaaaatattggtgtgtcttaagtaaatagttgttcatcaataaacttggattcataaactatgaattcataaactatgaattaacagtatcatgccaataaacatcacccatatcagcataggcaatgttgattggttaattactgtcttaaaaagagcaatatcccaactcttaaacttctaactcttaaacttcaccacatgctcagcattgggataatggtggtcatgctcaacatcacatacctcaccgataaccgttccatcttctttgatgggcctgtgaatgtagcctgtgcgttctgtgatgggcaaatgctcatgttcccagaccataaccgcctgcatgcaggtttgacgctgcgtatcggtcagcctttcgccattctcccagcgaccaatctcaatggcagtacgaaatttatcaataatttcaggggttagactgtttagaatttcttgtttattcatgggttatttttccaattaatgaaaggagaattaatccagtgaaaactcttcactgtataaattccaatgtagttttgtacggcacgcttcataaaagctatagctgtttgggtgcagtaataaaagcgtcttatcatgtttggcgatgatgagcgtttggtcattttccaaaggcacagaagtcttaccatctgcaccaaccatgggctgtgtgcggttatctttatgaatattaatcataatttggctgctgccagcaacaacaagcgggcggtcagatagcgtgtgtggatgcatgggtaccaaacaaatggcgtctaatgttgggtgaataatcggcccacctgctgacagtgcgtaggcggttgagcctgtgggtgttgcgacaatcagaccatctgcatgctgacgatagacatctttattattaatttttagtttaaaatcaatggtgtgaactgacttgcctgcgtgtaagacaatatcatttaacgcaatatcttcatgtaaaacttgtgtcaatgcattgtcattggtcgtattttgaatgatttgaagttttaataaaaatcgctcaaccagccaatattgcccatcaagcacctgtccgactttttcggtcagctcatctggattaatatccgccaaaaaccccaatcgcccccgattgataccaagcactggcacgccagtacctgccatcacagacgccgcctgaagcattgagccatcaccgcccaccacgatgaccaaatcgcactgctcacccatcgtgtggcgtggtgtgattatgatgctgtcatctgtatgctcaccatcaatcaagatgccctcaatggccgctgtctgtgcatcaatgacaatcgataattgacgcattttcagtagtctaatgagttcatttagcgtttctacaatactggctttgcctgcacgccccatcacaccaatacgatgaaatggtgggcgttttgggtgattgttggtaaaatttgacatggcttggcttaatcataaataatgcgtatcataccaaaaaaacgcccattaacacaacaaacacgccacgccttgtgatgaatgattcatacaaaaaggtacatatggttaacttgacttaacttgacaaagctacttggtttttggataatcaaggcaaagattttttatgtcatctgattttttatgtcatctgattaatgctctgtcaaaatagttgttaacaccgttttgataccgatttgcgaccaaacacggacatttgctatcatcattcctgtgtttttagttgattggttgattcattttcattgatgttcagattgacaaatttttattgaacaaggatatattatggccaaccctatcatcagccgtacaacacttgccaccagtgccgttgccatgagtgtgcgtggtgttgtcagtaaaaccgcttttttacttagcttagctgccgtttcaggatttggtgtatttttttatgccttatccatcaatgtctcatcatcgctattatatgccatggcattggtttcggtatttgctggcatgggcgtaggcttagccagtgccatgaagccgcaccttgccaaatcgcttgccattccttatgcactgattgaaggggtgctattgggtacatttagcctaatcatgtaccgatactacccatccgtaccattatctgcattatcagcaacttttatcaccgctgctgtcatgttgacgctgtatgccacaggcattatcaaagttaccgaaaaatttcgtgccatcgtaacctcggcggtgattgccattggtattttatatttggtgcagttgggttttcacccatttggttctagcctgcctttattatttgatgggggtatggttgccatcggctttagtgtttttgtgattttgattgcgtcgtttagcttattgcttgattttgacaatgttgaaaaaggcgtggcgtttggcgtggcacaagactatgaatgggtgtatggcatcggtattttatccacattggtttggatgtatatcgaatttttacgcctgattggctatttgcaagaataagccatcagcattaaaaccaacttaattttaattaaaaaccaccaaaatacgctgatattttggtggttttttaggttgattaaaatttacttagtttttttaatacgcatggcgtttgagaccaccaccaaactcgataacgacatgccaatcgccgcaagccaaggcggtacatagccaaacgctgcaggcaatagcaccaacgcattataaaccaatgcccatttaagattttggcggatgatggcttgggttttgattgaaagatgaatggctttgggtatcgagtgcagccgaccgcccaaaagaacgctatcacttgacacttgggcgagatctgcggcacctgcaatggcggttgagacattggcagccgccaaaacaggcgcatcattaatcccatcgccaaccatcaaaacaatgtgattatcttgttgtaattgcttgatgtatgacactttatcctctggggttagcccataatacgcctgatcaatgccaagcgttttggcaacttttagggcattggggttagggtcgcctgtcagcatcagcggtatcatgcctgatgatttgatttgctcaatcatctgatgggcatctgtacgaatcgggtcattaaaataaaaccgtgcaatcagccgccaactgccatcttgccaagctgataacagtaccgacatattggcttgatagtcctccagattttcttgatagcgtccatagtcaaagtcaggctggctgcttgcttggtcggtaacaaaactggcatgaccaatacgataacgcacgccctgagataccgcttccacaccgcctgcgatatgatggctcatctcttgaacagcaggcaaatgtagcccatgtgccgctgtcaaaatcgcctgggcaacagggtggcggctgccaatctctaaggctgctgccagtgccaaaatatcatcatctgggtaatcgctcaccaccgccaaaagatttgcctgcccaagggtcaatgtccctgttttatcaaatgccacatggctaaccttagccaaagtttgtaccgtatgaccacgagttggtaaaaacccaaagcttgccaagcgattggttgccacggtcagtgcaattggggtagcaagcgataacgcacaagggcaagttgccaccaaaaccgccactgtcgcccacaacgcttgggtcttatcaataaaataccaaaccacaaacaccaaaagcgacaataaaagtacgcgtgccacaaaccagcgtgccattttatcggcatcttgggcaatttggggtttttcgctcatcgcacgattcatcaagcggtcaatgagtgcaatttggctgttatcaacatcatcggttaccagcattaatagcggctggctgtcattttgagaaccgccagccaatctttcgccacgagttttgacgattaaatcgctctcgcctgtcaataggctttgggagacggtcgcagttttggataataagacgccatctgccacaatttgacaccctgattcgatccaaatgacatcaccgactttgacactttgggccaaaattttggcgttatcatcttgacccatttggctgatgcgtttatccatatcgcctttggtagccagccaagtttcaatggctgcctgtgcttggtcggtggcaagtgcttgaaccaaatcagacgcctcatcaagcttggtgaccaatatcggctcaatcaccaccaaatctgatgccatatttgatgcttttaggcgagcgttgtgttcaatatatcgtcctgccaataaaaaaaagataaacatggagaccgagtcaaaataagtctcacctgcaccgatgatggtggcgtataaactggcaaaaaaggtcaagattaaggcaatcgatacaggcacatccatattaatttgtcgtgtgcgtagtgcgtgataagccgacataaaaaatggcacacctgaataaaaaaagacagggatactaacaaacagcgaaacataacgcaaaaaatcacgatgctcaaccaaaatgccactgtacgcaccaaaatacatcccaatcgaaaacatcatcgcctgcatcgcacccaaagctgcaatgcctagccgtatgagcatttgttgattttgtcgtttgagcatcgcttcatgcgtatcttggcgataaggtttggcatcataaccaactgaatgaaccgtttttaaaatctcaccaatcgataagataccatcatcccaattcactcgcatacgctgctgtgttagattcacctgacacgccctcaccccatcaagcgaccttagccgagtttcaatcagccaagtacaggctgagcatttcagattggtcaccgatagctcagcggtgctgccaccattttcagcatacacaaactgctctttgatatcggcatgattatacgcatcaaaatttatcgcttcaggtaagcttgccgttgggctaatctcacggcggtcaagataatactgcgatagccccgcctcaacaatgctttgggcagccagctgacaccccaaacagcacatagggcgtggcttatcaaatatcatcgtaaaaaacggctctttgggtagcacttccccacaatgaaaacaacagcctgcaggcggtaggattaaactgtactcacccagctcatcatcgccaaaagtggctaagtctgggtttggcttgtgatcagattggttcatggtttgggtatcacttgatgacatggtataataatggattgtttaatcattggtgcggcgttttggtttttacgcttgttttgctcttttactttttttggttgatggattttttgggttatattgaatgattgacgattaaatttaatacatttacatttaatacatttactcatgacatattggataaatgcgttgcttttgtttgattgggcagtgtttggcatgaccgatatcgtcaatcggtatcaagcaaacacgccctttgatcgtgtcgtattcagattataccataagttcatgcgtacgctaaaaggctttgatggcggtttttgggcataacggtagacataacagattggtacaagattggtacacatttgggtagcaatcgtgataaaatttaaccattttgccaatttggtgtcataatttgacttgaaaaatccagccatttcggcgatagtatcatttttttattggggttttattgtgtcaaaatccgtaccacgctctttttggcgtcatcagtcagggctgattgtgacagggattttattgattgtcttgtttgttatgatggcggcatttgtgctgtacgccatgcatctaaataccgccgttgtcggtaaatttgaaaatcgcaaatgggatattcctgccaccttatactcacgccctttggtactgcatcaaggtgccgctttatccgccaaagaccttgaatcatggctaaaactgctcagatatagccatgatgacaccagtcaaacgggtcgctaccaaaaaaatggccaagtctacaccatttatacacgaggttttcattatggtgatgccgacaaagacccaaagcagctcatcgaagttcattttgatcgcaataccatcaaaagcctaaaaagctccgccccaaataacagcggtatactacgcctagaacccatcaaaatcggtagcatctatcctgataatctagaagaccgcctactcatcacacaagaacaaatcccaaaaccgctcgttgatgccttgattgccaccgaagaccgcaatttttatcagcatcatggcatatcaatgcgtggggttgctcgtgcgttattcaccaatctgacaggcggacaggtgcaacaaggcggttcaaccatcacccaacaattgattaaaaacttttatctggattctgaacgcaccttaaaacgcaaaatcaatgaagctttgatggcggttttattagaaacccattatagcaaagatgaaattttattggcttatatgaatgagattaatttgggtcaaaatggcaagcagtcggtgaatggctttgggattgctgcccagttttattttgataagccacttggtgagctgtctttggagcagtatgcgttattggtgggtttggcaaaagggcctagccactacaatcctcgcaaaaaccccgagcgagcattacaacgccgaaataccgtattaaatagcatgctggcaacaggtaaaattgatacggccacgcaccaagatgccatcaatcgcccactgggtgtggtaaaaacgcctgccatcgctcgcttgcagttccctgatttttttgatgccgtgcaacgagagctaaaaacccactaccgctcagaagacctgaaaaatcgtggtctgcgtatcatctcaacactagacccactcgcccagcaagccgccgataccgccatgacaaatcagcttggcaaactaagaaaaaaaggcggtcgcactcaaaagctacaaggtgcgttggtcagtgctcaccctgccacaggggagctggttgctttggtggggtcaggtagcgattttactgggtttaatcgtgccatcgatgccaaacggcaggttggttctttattaaagcctgtgatttatctgactgcctttcaatcaggtcaatacaatctcaccacacccgtcaatgacacccaaaccagctataccgtcaatggtcgctcatggacacccaaaaattatggcggtcaatctcatggcagcgtaccactactgaccgcacttgccaagtcatacaaccaagcagcggttaatgtcggtatgcagcttggtttggatgcgtttaaggcacagctgggcaatttatccatcaccaccgatgttccgccctatccatctgccatgctgggtgcgattgatttatcgcccatgcagatgctgggcatgtatcagatttttgccaatggcggtgcttatacgcccattcataccatccgtaccgtgatcgatgataacgggcgtgtactacaacgatcccaaccacgccatcagtttcgtgcaccaccgcaagcggtttatctgctgaaccgtggacttcaagaggtcatcaaatcaggcactgccaaagctgccgatagtatcaataaccatctgggattggcaggtaaaacaggcacaaccaacgataatcgtgatgcgtggtttgcagggtatagcggtaactatgtcagcgtggtttgggtgggccgtgatgataatcagcccatcggcttaacagggggttctggtgcattgcccatttggatggattatatgaaacgcctgaatttaacggcggtcaatctgcccctacctactggcgtgacttggcagtggatggatggcagattgggattgccgaccatggagagctgccctgatgccagatggctgcctgtgattgatttataccgcccaagccaaatgagtccttgtgccagtgccattttataccaagagcagatctatcggcagatgcttgaatatggctcacaaggcatcgcagacacagaagatgtgtatatcgaagatgcacccatttatgatgagcctgccgaagatggcgataatccttggtggtgaacataagtcaagaatgccattaaaatctgcttgattttaatggcataaattaaattgatgaaaatttagaattggtagttaagcgacagctttgcttcaattggtgtttttacctcctcttgatattgagcagacgcctctcctgaaataaagaacctagggttgatttgacttgtcacgcccaaagcacctgcgaagccaaagcccgataaatccgttgaccaccaagatacttcattattcatatcaataatgttcaaatcttgcttggtatcttgatagaacattttggcttttaaataaggttgcaacaacccataattcttggaaatttttgtaccgatatttaccgtggtcatagatgccttttttggattaatttgcaaattaggcatctgatcatatctaaacgattttggattggtttgaatatggccaatttcaaaagaaggttggaaatccacattatggaatttcatctgctgctgagcacccaacgcaatcgcccaggtattatcctttatacttgctgttaaattatcatgattggcttgtttagcatgtattttttgtctgacattttgccacgcgccttggaggaagatctcttgttgatttggtaataagcgattaagataaacaccaaagcctgttgcatcaagatcatttttaccaccaaaaacatgatcaacatcaccttcacttttgttaatataggccccaagatatgtttgcccaactttagaacctgctcccaatgtcgtttgattaagctttaaatcaaactgggtattgtgacttttaatattattttcttggtaacgatgatttagccaaacactttgtctgttattcatcgagcccaaatgattcatttggctacttaatgtatacaagcttcccatgccggtatttaaggcggtcttagtcattgatgatgcaatagggctattgtcattggcaaattggctaagctgcaaagtgttatttggtcgcattactaattgataagcatatgctccttgctcagctgcatcaacaacattgttatttgtgtcaatcaaataaaaactgccttgattgttatcgactttcaataagctttgatgatttttatcttttgatatatggcttgggataccaataccatgcctgccttttagctcatttatcttgacaggtgcatcgcttggattgatggcaaatatcgtctcaccagataacttatcaatatgtaaattagaatggtcttcaaccatcacatgacctacaccggacaatgtttgaatactgatttgagaatcggtggtggtgttattttcttgggaatttgcattgacttgaaaaacaccctttggggcaacataaatccagctgtctttggcagacagttcaatctcttgaacagtggttggttgatcactttgaccaaaaatcatcatcttagcgtcatggtttagcaccacttttgattggaattgccctgtaacgctcattgttccttgattgatataactatcatcagccaatgcgttattgcccgtaaatttaaggtggccttgcttaacggttgcaccagcaaaagtattattgccagataaggttaattcgcctggatgatttaaaatcagtctaccagtacctgagatgtcatttttccaggtatcttccagagaaaatcctgcaaaatccaaatgcttatcctgagtcgttgtctctatatcctgataaatatgagaaataccatcataagctttcggcaaattgatcaggccccatgtgtgatttttattatccaaatcacccatgtgagcatgggaatttttgggataagcggtagaagccaatacttggcgtcgtgcatcgccatccaaataattaaaacgcaaccttaataaagcgccagctgtaccaggcatttcctctggttctaaacgacttgctttttcatcactttttaatgtgccataatatccaatttgataatcagaagctttgtattgttcgtgcaaatcttgaggaagcatctccagacaactttttaatggtgcattctgacagctttcttcaaatggctgtctggcttgtttaatatacctaaccaatccttgagcaatctcatcgtcatttaacaactgtgccatataataatagcgtgcgagtcgagaagtcatggtatctgttggaaaatgcacacccacaatgactcggctttctccatactgcaatgcacgagagaatatctcttgacctcgctcaggaaatgccatcgccatcacaaccgcttgaccaaaaccattggaggtatgcccacttggataagatgaattttttctttctctgccttggctatcaatataggttttgagattttcataaccctcaatatacttgccttccctatccataacttgataagggcggccacgcagatatttgtcttttaaaataaaatcataagctctcattctgcctacattaaaatcatcgctatagatagcattggctgataaatattctaaatttttaaagatatttacaaactgttcatcagttatatgcggagcaaactcctttaaggcagattttctaaattcatggctagcatgagcaaagctttgatttttatcctcttttgcaagggcgagcctttctgctgttgtatttttttgcatatcccaagaaattttacgatcaacttctgcttctaaagtgccctttttgggaaaaggtgtcacaacctgggcatcaagatgttgataccagctctgactttggccagctatctttgtagacaattgatcaaatgcttcatcatgagcataagcttgatggctcatcaataatgaaaaagcgatgctggctgataacagcttatatttaggcataacaaacccttatgttaacaaaattaggctgcattttaagttgtaactatgacaaaacagtgataattttgtgacaatttgacacaatgtggaaaattattactattttaatgttacatgataaccatttacttaaggcgatattaggcccacaatttagccacaaattcttcaaaaaactttgctataataaagccattaagcaagcaactatttgaatttttaggatgtttattatgtcttggcaacaacttcatctacaatgcccaaaatccgccgtagaacttgccgaagccttatttgatgaggctggtgcggtgtctattttacttgaagatgcgggcgatgagcctttatttgagcccatgcctggtgaagagcctttgtggcgtgatgtggtggttaccgccatctttgacaccaacagcgatgacagctgggcaggcactcattttgaaaacctagccgctaagatcgcaagtgaggtgaatgccacacgattttggctaacatccttagatgataaagactggactcgtgaatggatgagctattatcagccgattcagtgtgcaggcaatctgtggattgtgcctgagtggctgccagcaccagacccagcggcgattaacctaatcttagacccagggcttgcctttggcacaggctatcacgccaccactcggctatgcctagattggcttgccgcccaagagcttagcgataagctggtcattgactatggttgtggctcggggattttgggcgtggcggcactgctgctcggcgcgcgtcaagtgctggcggttgatattgacccgcaagcggtacttgccacacgccaaaacgctgccctaaatggcgtcgatgacaggcttttggcatttttgcccgcagagtttgacgcctaccgcacccaaaacccacagcttgccgatgtcatcaccgccaacatccttgccaagccattgatcggttttgccccactgtttcatgatttactcaaaacaggcggcttgatcgtgctggcaggtctgacccaaaaccaaacccaagcggtcatcgatgcctactcgccttatgttacgcttgatacgccattttgttatgcagatgcccaagactgccattggcaacgcctaagcggcatcaaacctaccaacccataagcgatatgccatgagccacaaacctaagccaacaccgctatatcaacaagttgagcagaccgccaagcgttattttgagacattgggcgatgctcatactcatgatgtctatgccacttttttggccgaatttgaaaaaccgctgctcatcgccgcactcaatcacacgcacggcaatcagtcaaaaaccgcccaaatccttggtatcaatcgtggcacattacgcaccaaaatgaaaacccatcacttactttagaccgccagttatcgccatggatatgggcaggtgtgctcgcctgccgtatgatggcgatgacaccccatttgccccatatctgcacgatttgacatgatttaacatgtgatatgatttaacatgtgacatgatttaacattgtttaatactgttgccatcattaccataatttagtaacgcatttgtaaaaatcattgccccctttttttatgtgtatcatatgaatagaatattatgattgtatctgattattgtatcagaatggtgatgcctacgagttgatttgggttaatcactctattatttgatatgttttgaaactaatctattgacttaaatcaccatatggttataatttagcataatggtaggctttttgtaaaaatcacatcgcaatattgttctactgttaccaccatgcttgaatgacgatccaaatcaccagattcattcaagtgatgtgtttgtatacgcaccatttaccctaattatttcaatcaaatgcctatgtcagcatgtatcatttttttaaggtaaaccaccatgaatcacatctataaagtcatctttaacaaagccacaggcacatttatggccgtggcggaatatgccaaatcccacagcacgggggggggatagctgtgctacagggcaagttggcagtgtatgcactctgagctttgcccgtattgccgcgctcgctgtcctcgtgatcggtgcgacgctcagtggcagtgcttatgctcaaggtatcgcaattggtcaacaaaacaacaactcaaaaggcgatgccgaggcgacaggtaatcaatccgttgctcttggtgaaaaagctgttgcaagtggcagtcaagccatcgccatcggtggtagccaaaacaaatcaaataatagtaaagtatcaggtgccaacgccaaaggtgaagagtccatcgccatcggtggtgatgtattggctcagggtcctgcctcgattgccatcggtagtgatgacttatatttggagagtaaaggcttgtatacactcccagaagagattaaaaaacttattgaaaaacattcagaattaaacagaatacgaaaactggatcccaatagtaatcaaaaatatttacacacaaaagcacaaggacacgccagtattgcagtgggaaccatggcacaggcagagggtcattttgccaacgcttttggtacacgggcaatagctaaaggcaactattccttggcagtgggtcttaccgccaaagccgacacagaatcttcaatcgctcttggttctaatgcacaagctagcaagtttgcagcgatagccattggtggaaatactaaatctgagttgggtcgaggtgttgccctaggttataattctcagatcactgctaatgataataatctaaatggagcctataaaccagacggtgaaacattacacaaggatcatgaagccaccaaaaacggtcagccgaagaatacagtggatatattttccattggtaatagtgatctcagacgtagaatcatccatgtcggtgcaggtgttgatgccaccgatgcggtcaatgtggcacagctagaagcggtggtgaactgggctaagaagcgtaaaattacttttaagggtgatgacagtactggcgtacaaaaaggtttcgacgaggagttaactattaaaggcgggcgagcaaatgccggtgaattaaccgacaataacatcggtgtggtaaaagataatgataatggtggtggtctgaaagttaaacttgctaaaaatttaactgatcttgaagcagttaacacgcaaaacctaaccgccacaggtgcaatcaccgtaaataataatagtactaccaatacggctacattattggctggtggtttaactgttaaagatattcataacaaacaaatccaagtcagtgctgatggcattaaatttactgatatgaatggtggtacatcagccccagtagcagccggcactactcgtattaccagagatacaattggctttgccaaagaaggtggtacagttgatgacaattcaccatatttggataacgcaaagctaaaagttggcaatgttgagattaataaagacactggtattaatgcaggtaatcaaaagattaccggacttactgatggtgcagacgatgccgatgctgttaccatcaaacagctcaaaaacgccaagcctaatttaaccccaggcaatggcattgagattaacaatacaaacagtctattagttgatgctgctaatggtaatgttacccccccatcttataccattggggtgaaaaccaccactctgaccaataatggccctagtgatagtaaatttgctgttaaggatagtaatacgcataacaatagcttagttaccgccaaagatttggcaggctatctaaatgaagtcaatcgaacggctgacagtgctctacaaagctttaccgttaaaggtggtgatgcagcaagcaacaacagcatcacgctagataaaaccagcaacagtctaaccgtagcaggcgataacggcattactgttaaaacggatacaactcagaaaaaagtcacggttggcattgaccaagccaatggcttaaccacgcctaagctgaccgtgggtagcaatagtaaaactcaattggttattgagcaaatggttatcggtaacgacaccaaaaacatcatcaaagggctgtcctcaacactgactgacattaccaacacagataatacacacaccacagaacaagacaatgacgcccaaggcaaagaatccaacgctgccagtatcaaagatgtgctaaacgcaggctttaacttgcaaggcaatggcaagcccgttgactttgtctctacttatgataccgtcaactttgccaatggcgatggcaccactgccacagttacctataattataatgaaggcaaaccaaccagcacagtggtctataatgtcaatgtggatgatacaaccattcatctggcaaataataatggtaataaaaaacttagcgtaaaaaccaccacattgaccaaaacaaatggtgcaaatggtaatgcaactaaatttagtgccaacaatggcgatgcccttgttaacgccaaaggtattgccgacaatctaaacatcctagccgaggaaattcacaccaccaaaggcacagcagacaccgccctacaaacctttaaagtcaaaaaagacggtgcaaccaatgatgatgacaccatcaccgtgggtaaaaatgccgtcgacaccctaacattcaaaggtgaaaacggtctaacggttgctaccaaaaaagatggtacggttacctttggcattaacacccaaagcggtcttaaagccggcgacaacaccactctaaacaaagatggcttgtctattaaaaaccccactggtaacgaacaaatccaagtcggtgctgatggcgtgaagtttgccaaggttaataataatggtgttgtaggtgctggcattgatggcacaagccgtatcacccaagataaaattggctttgctggggctaatggctcacttgataccaccaaaccccacctaagcaaagacggcattaacgcaggtggtaaaaagattaccaacattcaatcaggtgagattgccaaaaacagccatgatgctgtgacaggcggtcagatttatgatttagaaaccgaacttaagaacaaaatcagcagtactgccaaaacagcacaaaactcattacacgaattctcagtagcagatgaacacggtaataactttacggttagtaacccttactccagttatgacacctcaaagacctctgatgtcatcacctttgcaggtgaaaacggcattaccaccaaggtaaataaaggtgtggtgcgtgtgggcattgaccaaaccaaaggcttaaccacgcctaagctgaccgtgggtaataataatggcaaaggcattgtcattgacagtaaagatggtcaaaataccatcacaggactaagcaacactctagctaatgttaccaatgatggtgcaggacacgcactaagccaagggcttgccgataacaccgacaaaacccgtgctgccagcattggtgatgtattaaatgcaggctttaacttgcaaggcaatggtacagcggttgactttgtctccacttatgacactgtcaactttgccgatggcaatgccaccaccgctaaggtgacctatgatgacacgagcaaaaccagtcaagtggtctatgatgtcaatgtggatgatacaaccattgaagttaaagataaaaaacttggcgtaaaaaccaccacattgaccagtactggcacaggtgctaataaatttgccctaagcaatcaagctactggcgatgcgcttgtcaaggccagtgatatcgttgctcatctaaacaccttatctggcgacatccaaactgccaaaggggcaagccaagcgaacaactcagcaggctatgtggatgctgatggcaataaggtcatctatgacagtaccgataacaagtactatcaagccaaaaatgatggcacagttgataaaaccaaagaagttgccaaagacaaactggtcgcccaagcccaaaccccagatggcacattggctcaaatgaatgtcaaatcagtcattaacaaagaacaagtaaatgatgccaataaaaagcaaggcatcaatgaagacaacgcctttgttaaaggacttgaaaaagccgcttctgataacaaaaccaaaaacgccgcagtaactgtgggtgatttaaatgccgttgcccaaacaccgctgacctttgcaggggatacaggcacaacggctaaaaaactgggcgagactttgaccatcaaaggtgggcaaacagacaccaataagctaaccgataataacatcggtgtggtagcaggtactgatggcttcactgtcaaacttgccaaagacctaaccaatcttaacagcgttaatgcaggtggcaccaaaattgatgacaaaggcgtgtcttttgtagactcaagcggtcaagccaaagcaaatacccctgtgctaagtgccaatgggctggacctgggtggcaaggtcatcagcaatgtgggtaaaggcacaaaagacaccgacgctgccaatgtacaacagttaaacgaagtacgcaacttgttgggtcttggtaatgctggtaatgataacgctgacggcaatcaggtaaacattgccgacatcaaaaaagacccaaattcaggttcatcatctaaccgcactgtcatcaaagcaggcacggtacttggcggtaaaggtaataacgataccgaaaaacttgccactggtggtatacaagtgggcgtggataaagacggcaacgctaacggcgatttaagcaatgtttgggtcaaaacccaaaaagatggcagcaaaaaagccctgctcgccacttataacgccgcaggtcagaccaactatttgaccaacaaccccgcagaagccattgacagaataaatgaacaaggtatccgcttcttccatgtcaacgatggcaatcaagagcctgtggtacaagggcgtaacggcattgattcaagtgctgctggcaagcattcagtggcgataggtttccaggccaaggcagatggtgaagccgccgttgccataggcagacaaacccaagcaggcagccaatccatcgccatcggtgataaagcacaagccacgggcgatcaatccatcgccatcggtacaggcaatgtggtagcaggtaagcactctggtgccatcggcgacccaagcactgttaaggctgataacagttacagtgtgggtaataacaaccagtttaccgatgccactcagaccgatgtctttggtgtgggcaataacatcaccgtgaccgaaagtaactcggttgccttaggttcaaactctgccatcagtgcaggcacacacgcaggcacacaagccaaaaaatctgacggcacagcaggtacaaccaccacagcaggtgccacaggtacggttaaaggctttgctggacaaacggcggttggtgcggtctccgtgggtgcctcaggtgctgaacgccgtatccaaaatgtggcagcaggtgaggtcagtgccaccagcaccgatgcggtcaatggtagccagttgtacaaagccacccaaagcattgccaacgcaaccaatgagcttgaccatcgtatccaccaaaacgaaaataaagccaatgcagggatttcatcagcgatggcgatggcgtccatgccacaagcctacattcctggcagatccatggttaccgggggtattgccacccacaacggtcaaggtgcggtggcagtgggactgtcgaagctgtcggataatggtcaatgggtatttaaaatcaatggttcagccgatacccaaggccatgtaggggcagcagttggtgcaggttttcacttttaagccataaatcgcaagattttacttaaaaatcaatctcaccatagttgtataaaacagcatcagcatcagtcatattactgatgctgatgttttttatcacttaaaccattttaccgctcaagtgattgtctttcaccatgaccaaatcgccattgatcataggtaaacttattgagtaaattttatcaatgtagttgttagatatggttaaaattgtgccattgaccaaaaaatgaccgatttatcccgaaaatttctgattatgatcacttttcataaatttccccaatttgtctttataaatatcccaagaaatggtattattttattgccatcagcatatgcgacaactcatcgtatcatctttttatcataaaaatgcaaataggcatatgcatttttttgaattaaacttacgcatctttcattatgggaattaggtcagtaattatgacaaaaaattatgcattattatccgtctcagataaaacgcaaatcgttgaatttgcccaaggtttggtagaatccggctttggtattttatccacaggtggtacttttaaactcttaaaagaacatgggattgacgccattgaggtttctgcccatacaggttttgctgaaatgatggatggtcgtgttaagaccctacatcccaaaattcacggtggtattttgggccgtcgtggtattgacgatgccattatgaatgaacatggcattgatcgcattgatatcgttgtcgtgaatctatatccatttgccaacacggtcgccaaagacggtgttgttatgtctgatgcgattgaaaatattgatattggtgggcctgctatggtacgctcagccgccaaaaatcatgcccatgttggtattatcaccagcccaaatgactactcacgcatcctagatgaactaaaaaaccaaggtcatttaagccacaacactcgttttgatttggcagtcaaagcatttgaacacactgccgcctatgatggtatgattgccagctggctaggtgcacgcttaccagtggataaagagacggcacccagtgatgatgccactgcaaccactcaattttcacgcacttttaatcaccaattcaccaaagcacaagagcttagatatggcgaaaacccacatcagtcagcagccttttatgtagatgatcatgcaacagaagcgtctgttgcgactgcacagcaattacaaggtaaagcgttgtcttataataatattgctgataccgatgcggcacttgagtgtgtcaaatcttttaccacgcctgcttgtgtgattgtcaaacatgccaatccttgtggtgttgcaacatcagaaaacggtattttagatgcttatcatttagcgtatgcaaccgaccctgaatctgcctttggtggcattattgcctttaaccgagaattagacagtgatacagcccgtaccatcgttgagcgtcaatttgttgaagtcatcatcgcaccaagcatcgctgaaggtgttctagaaattacaagcagcaaaaaaaatgtacgcatcttggtatgtggtgagttgccacagccgacacagcgggcagctcaatttgacctaaaacgagtcaatggcggtctacttgtccaaaatcaagatttgggcatgattgataaatcagacctaaaagttgtcaccgagcgtgtgccatcagatgccgagcttgatgatttgctctttgcttggaaagttgccaaatatgtcaaatccaatgccattgtttatgccaaaaatcatcaaaccattggcgtgggtgcaggtcaaatgagccgtgttaattcagcacgcattgctgcaattaaagcagaacatgcagggcttgttgttgagggtgcagtgatggcctctgatgcattcttccccttccgtgatggtattgataatgccgctgctgctggcatcaaatgcatcattcagccaggtggctcaatgcgtgatgcagaggtgattgccgctgctaatgagcatggtatcgccatggtctttacaggtatgcgtcatttccgccattgagacgaccaaaatcgatggtgtgtatctgatacacccatcactctttaaatgatataaattaaaagcccaaaattttgggcttttatctattaaaaactgtataacgcttagttaaaactactgtgttaaaactactgtgccttgagtgcgtcttggttgataacaagctcgctgctttcacgcaaataatgcacatagtcctccaactggtcggcaccgacattatctcgaatcaccgccacagcacgcagacggtcggtggctgaaagctgggattcgctgctgtcattgacaacacctccaacgatcacacttgcaccctcttcggtttgcactgcccaaacatcatacccctctgcactgcgatttaagaataaactggcaagctcaagtgggcttaacaaggggttcatgcgtgtggtcataccaatattggcagaggtagtcatcaaagcggtcacacctgaatttttagcctcatcagccacttttttggcatctgccatcgcaagctcaatggctttttgtttggcaagtgtctgtttgatttgtgctttggcttcatcaaatgtcaatgggcgttctgcttcataattggttggctgtacccaaacatttttctcacccaaagaaatatttggctgacgccttgatcttgaatggtaaaatcatcaaaagcagcagcaattactgctggctgtggtaaagcggtcgtattgttggtttgtggataggcaatgatttgcttgacttgtacgccagcttctttggcaatatcagccacgcccatgccgtcagttgccatcgtattaatcttggcagataaatctgcaaaggcttgatcacgcttaagtttggcagctctatccatcaattgatcacgcatactcgcaatatttggtgtatcgttactgactttagtcaccttaaaaatatgatagccaaatcctgtttggacaggttgactgatctgacctacgctcagacctgacaaagcctgctcaacactggcagcatattccccaaatactgatgggttaaagctaccaatcacaccaccatttgagccacttggatcatcagaatgagcttttgccaaagcttcaaatgactcgccagcattgagttttgattggattttggcagcacgattttgagcatctggacctgtcaataaaatctgtgccaactcccgaccatccgttatgccattttctcgaaggtagttggcgtactgtgcattgatctcttgttcggtgggcgtaccaacactcaatacatttgggtctaattcaatatagcttagatccactgtcgcaggcttgattaacttgtcttgatgttcatcaaaataggcttgaatttgtgcatcgctgatttgcacttgatcaacatagtcctgccaatgatatcgatgtacccaaacctcacgcgcctctaattgcaaatcaatcaattttgagacttcgctatttggataaattgccgtaccaacgataccagtaatcagctgacgcaagcttaatcgcagtcgttctatggcaaataaaacatctttggtcagtccgttttgttgcagataagctgcaaaacgatcatttgaaaattgcccattgtcatgaaaaacttcataatgttgtaaaatctgcgtaatcatctcatcagagaccgtcatacccaaatatgacgcctgattttcaagcaatgctttatccgttaatcgctttaaaatcagctgctgtagtgcgtgttcattaatcaagctggcatcaacaccctgttcaatcaaagcattacgctcagcattaacctccgcttgaaaggttgcgacatctaccacctgattaccgactttaattagctcatttggttgaatggcgtgtccaccaaaggtacccacacccaaaaaagccatcggtatcaaagtgcctaccaaaaccagccgacccggccagctttttaagaagttacgcatattttccataggtttgctatactctacaaatcagtcggtgttacaaataacatagtgataataaaatttatatatcatacgctaatttatcagatttctcaaaacactttttgtaatttgacataaaaaagccgcccaattggagcgacttttttgtgtcatcatcaagtcaatcagttgactgattcttttaggactttacctgctttaaagctaggtactttgctggctgcaatttggattgcttcgccagtttttggattacggcccatacgagcagcacgctctttgacgctgaaagtaccaaaaccaaccaatacgacatcatcgccacgctgtaatgcaccttgaacactttcagtaaatgcattaaccgctttggcagcttgctctttggttaggccagcactttgtgcaatactatctaccaattcagacttattcataatataccctctttacattaaatgaaaatttttcatgctaagttaccaaagcatctttttataaggacgcattttaaaagcatccttgagcttttacaagtgctaaatacaaaattttgcagaaaaatgataaaaatttatcatccttgggcaaaatcatatcaagccacgactacctttataacaatcacagtaacaataagcaagtaaaattacatatttttatgtaaaaactgtaaaaaaatgctatttttatgcctaaatatacagtaatatgaatagaatttattgatcgcagtatccagctttctaaagcttaagtcagctgtaacatttgcaatattgacacccgatcaaagcatcggtatcttaaccttgcattatgatagcaaaattatcatattttatgaacttttaagccgacttgactggcaatgtgcgattaaaattaaagttattatttttaggaaaatttatgacaaccgagcattcaaatacaatcaaccctcatgccaacggaggcatcgtctcaaaaagcttgctgagtattgtattaatttttattgaatctgcactaacattaatgttacgctttgatccaaaactacgccaattggcttatccgcttgccaaatctggtacagttgtctgcattcgctcgtatttaccacatatcacgatttatgccacctttggctatcgagggattttattagacaatgaattgcccgaagataagccaaccgccgacatcaccatcaatggttatagcttccagctgattaataccctaatcaatcataaccccgatcatgtcgatgccctacaaattcgtggcgatgcagcattggttgaaaatctaaaagcactcatggttcgtatgggtgttggcggcagtattcaaagtatattatcaaaggttacaggcggcaataaacaaaaacccacccccgaacaaaaagccgaaaaaattgccaattatcaattaaaaatcaatgaacaagctgagcgtattgatactttatctatggaaaataaacgcttagccattcagctggcagagcaaaaaagtaaaaataaaaccacttttattgttatggtcattgccatcattgtggcagtggtgagtattattatgcattttgtgatttaaacctgatgattttattaatttgttataatataacaaattaataaaatcaatccattagattaaaatatctgatggattttttcttgctttaatcttgacctatttactcggaattattataataacgccattcatcatcaaaatttttatcaatgcttatattgaccaaaattaggcaattatggaagtatttcaatgcgtttaacaactcgtggacggtatgccgtcactgccttattggatttggctgtccaagagagtcgccatcaaggcgcagtgtctttatcagacattgccaaacgccagtccatctccatatcttatttagagcagctgttttcaaaactgcgtaaaaaaggattggtgaatagtactcgtggtgctttgggcggttatcatttagcaaaaccacttgaagatattgacatcatgagcattattaccgccgttgatgaaagcatcaatgccactcagtgtggcggaaaaggcaactgccaagatggcgcaatgtgcttgacacatgatttatggcacaatctgtctcatcatattgaaagctatcttaaaaaagtgactttggcacagcttttagaaaccaaaaatacacaaaccatcgctgatcgccaagtcaatcgcctacatcagtttgaaaaagataattcacaaatcacaaccatcactttaattgggaatccagcatgagccagacttcactcatctatttagactacgccgccacaacacctgttgccaaagaggtcgcagataaaatggtcaattatcttacctttgagggcatttttggtaaccccgcttcacgctcgcatggctttggctggcaagcagaagaagctgttgaaaatgcacgcttacaaatcgctgaaacggttggcgccgacccaagagaaattgtttttacttcaggggcaaccgaatcagataatttggcaatcaaaggcgtggcacatttttatgaaggtcgtggcagacacatcattaccagtaaaattgaacacaaagcggtactggatacttgccgtcaattagaacaagaaggctttgagattacttatcttgagcctgaagcaggtacaggcttaatttacccagaacaagttgaaaacgcattgcgtgatgacactatcttggtgagtttgatggcagtcaataatgagcttggtaccattaccgatatcgctgccattggtgaaatcacacgcgcaaaaggtgtgttatttcatgtggatgctgcccaagcagttggcaaaattaaaatcaacctcggtgagcttaaagtagatctgatgagctttagcggtcataaaatctatggtccaaaaggcatcggtgcattgtatgttggtcgtaagccacgtgtgcgtatcaaagctgaacaacatggtggcggtcatgagcgtggtatgcgttcaggcactttggcaacgcaccaaattgttggcatgggagaggcgtttgctttatctgtacaacgatttgacgaagaccatacgcacatcaaagcactgcgagataaactttggcatggcttacaagatatcgaagaagtttatttaaatggctcaatggagcatggcgttcctaatatcatcaatgttagctttaattttgttgaaggcgaaagcttgatgatgagcctaaaagacttggcggtatcatcagggtctgcctgtacttcagcgacgcttgagccttcttatgtcttgcgtgcgattggtcgccctgatgagcttgcccattcatctatccgctttagtattggtcgctacacaaccgaacaagacattgatttggtattaagccaaatccatgaagcggttgataaattgcgtgaattatccccactttgggatatgtttaaagaaggcattgacctaaataccgttgagtggcaagagcattaatccgccaaaaactcagtcatatttttgggcagattttgcacaattgtttaaaattattctaaagttagacccatatcaaccatttacacaaaacctaaatagcaagatgaggcagttaatccattaagtcattaaatgcctcaatcaagttaaacttaactataagagagtcaattatggcatattcagataaagttattgatcactatgaaaatccacgcaatgtgggcaatttggataaagctgccaaaaatgtcggcacaggcatggtcggagcccctgcgtgtggcgatgtgatgcgactacaaattcaagtgagtgatgatggcatcattgaagatgctaaatttaaaacttatggctgtggctcagcgattgcctcaagctcattggtcacagaatggctaaaaggcaaaacacttgaccaagctgccgccattaaaaataaagacattgccaatgagcttgccttaccgcctgtcaaagtacattgctcagtactggcagaagatgccatcaaggccgccattgaagattatcaaaccaaagcacaagcataaataagcccaactatccagataatctaaactgtaacggttggttttgatgaatcagcatatcaaaatgtggtcaatttcatcaatttcataggtaaacaaaggagtcgctatgatcaatttaaccacacaagcagcacaacatattaaagattttcttgaaaatcgtggtagcggtgttggtattcgagttggtgtacgcacagctggctgttctggtcttgcttatgtacttgaatttgtggacgacccaaataatagtgatgagcgttttgaatcgcacggcgtatcggtatttattgaccccaaaagcttggtgtatctaaacggactacaaatggattatgtcacagaaggcctaaactctggctttaagttcaccaatcccaatcaaacaggcgaatgtggttgtggtgaatcatttaccgtttaatcgccaatcttgataaggaatttatgatgaacaaagctaacttttttggtttatttgggctacctatcgcatttgatattgataaaaatgcgttaaaatcagcattattatcgctacaaaaacagcatcatcctgatcgagatgccaataaagccagcaccaaccaagcttcgcttatcaatcatgcctatcaagtcttatcccatgccgacagccgagctgcttatttgcttgagctgtctggtcaggcagtagatttgtcgcagtctattaatgattgggactttttagatgaaatgatggacttgcgtattcgcttagatacgaccgatgacaaaatggttttggatcaaatatccaaccaagttcatgcactcagccaagagcaatctacaagatttatgcaaaattatcaaaatcacacatgggcagaagcaatagatgcaacccgtaagctccaatttcttggcaaattactggttgatatcgatgccaaagttaccaaattattatcccaaggtcatgatgatgatttgtatgtataatcacactgctttgacaaaacttttaccataccaagatgttaaaatttgacaagtgtcatatcatacacacattttaattgactgttaggcttaaaatgcccaatcacttaagctcttatttttagccacattagccagtataagaatccatcatgtctttattacaaatcagcgaacccaatcaaagcaaaaacccccatcagcatcgttatgcccttggtattgatttgggtacaacacattccttggttgccgttgtcagatcaggacgctccgaagtgcttgcttttggtcagtcgccactgttgccatcggttgtttattatggtaaaaaaagcagccgccctatcgtcggtaatgatgccttaaactatgccgatgaccataaaaacaccatcatctccgccaaaagattcatggggcgtgccaaatcagacattaaattttctcatccttatgatttgtctggcaatcatcaaaccatgcctgcttttttaaccgctcaaggtgaaaaaagccctgtagaaacttctgcacatattttaagacatctaaaaaatcatgccgccgctgccttaccaccagacagtattcaaggtgcggtgattaccgtacctgcctattttgatgacgctcagcgggccgccaccaaagatgcagcgaccgcagcaggcttaaatgtacttcgcctactcaatgagccaactgcagcagcaattgcctatggcatcgataaaaataccgctcaaggaaattatttagtctatgatcttgggggcggtacttttgatgtctcattgcttcgcttatctgagggtgtctttgaggtacttgccacagggggtaattctgcccttggtggcgatgacattgaccgactgattgcacattggttaatacaatcatctcacctgaccccagcagatattgatgagactgaaaaatctcgcttagcaaaacttgccaaaacctataaacaagcattaagtagtcaagacagtgttgttattgaagttgagattggtggtattttagtcacgcaaacactaaataatgacatgttaagtgagattatacaacctgttatccgtcgtaccattcaatcttgtgaacaggtcatgcgtgatgccaaaattgacaaatccaatctcaatgacatcattttggtgggcggctcaacacgcatgccagtcattcaaaatgccgttacagcatattttgagcgtacgccgttatgcaatattaatcctgatgaggttgttgctatcggtgctggcattgctgctgatcaactgattaatcaatcaaacgaaacgctacttcttttagatgtgacgcctttatcgcttgggattgaaacaatgggtggattggtggaggttatcattccacgcaatacccccattccagtgactcgccgtcaagtttttaccacacatcaagacggacaaactggtatgattatccaagtggtgcaaggtgagcgtgatacggttgccaattgccgaggattggcacgctttgagctacatggcattccaccgatgaaagcaggtttggcacgcattgaggtaacttatgccatcgatgccaatggtcagttgacggtatccgctcgtgaaacaacgacagacatcatcagtcaaattcaagtcagtccaagctatggtttatccgaagagcaacaagagcagctcttgcaggcgggttttattcatgctgctgaagataaagctgctcgcatgctcatcgaaactaaagttgaagcccaaagggaattacttgccttacagtcagctttggatgaatttaccgatttacttagcgatgaagaacagacaaatttacgccatcatatgcaagtgacggcagattcactaaatacagatgacaaggccgccattgacgaagccatcaaagccttaaaggtacacagtgaccattttgccagtgttattatggataaaaatgtcaaagacgcccttactggtacacgcaccagcgactggtaaattaaagtaaatgtttaatcaattttatagattaaatatgaattttatcttaattttatcttaatttaagaagaaaagtttaaatattattaataagagaacatcatgaccgttgtaaccattttacctcatcacgaaatttgcccagagggtgcaaccatcgaggttgcagagggtgaaaatctatgccaagccatgctcgagcgtggtataaaagttgaacacgcctgcgatatgtccaaggcatgcacaacttgccatgttgttgtacgacaaggctttgatagtctagaagaaatggatgatattgaaggcgatttgcttgaccgtgcttggggtcttgaaccagattcacgcttatcttgccagtgtattgttgctgatgaggatttggtgatcgagattccaaaatacaccctaaatcatgccaaagaaaaccattaattcaccacccaaaaagcctgcaaattgacagcaggctttttattacatttagatatttgtgagtatcttgctttaggcttatgccatgtttatcgatgaaccaagagcatggatagaccgaagttggacgctgtgattttattttggtttacggtatcgctcattaaaaaacactcataagaccattcatgagtgttttttgtataaaaagatactttaagacctaacatatatagcccataatgcgtaaattttccttggcattatcaggtaatttatttaacatggtggtttttagcgtctcatcacctttgtttagtacaaggctaatcaaaggcaatacatcaaatggtaaattttcggcagtttgtgcaaaatcaatcaaataaccagcaccaatcacatcttcatcagccataacccgctgatacaccacttgccaagacaactctcctgccccaccatgccttaaaatcaaatgaatggcttgtaatgctgtgtttggtgtctcacaaattgccaaaatctgctcagaagcttgcttgatggcttgtatttttgtttgattactcacaatttccccctattttaatgattaacttaatatggtcaaattcacaaaatacaagcttcacctctaatcacccatcactcgaccttctcggcgtggatcggcactgccaaccagcctgcttggctcgataataatggcttgaacacctgaatttagcttacgcacatcagtcttatagcccaaatcatttaatgcgtgttgccattggacggcggttgtatccatctctaattcatagctaccaaaacgatttaataaattgggtgcactgatggcatcttggatatccatattccagtcacgatgcccacaatcgtcttagcgacatagccaatgattcggctaccacctggggagccgattgccatataaggcttgcctgctttaaatacgatggttggtgccattgaggagcgtggtctcttaccaggctcgacatgattggcgacctgtttgccctgctttattggctcaaaactaaagtctgtcagctcattattcagcaggtagccatttgccatcaaagttgagccagtaaccatttgccatcaaagttgagccaaacgcattttcaatggaagtcgtcattgatagcacattacccgccttatccacaattgagatatgactggtagaaggtaactcaatcgcttgtgaggatacccactcatgaataaaatcacctgcagatacgctaggcagtgccttatccgactgcttaagcagctggctgcgatgttttaggtcgtctttggaaatcaactggcgaatgggtacaggtacaaaatcagggtcgcccaaatatacatcacgatccgcaaacgcaagcctagaagcatcgcccaagagacgcaagccttcagcatcacaccccacctgattgggtgaaaattcatttaaaatccccaaaatctgacccacagcaatccctgagcttggtgcactcataccgcatacttcataaatacgataagtcacacaaacaggtgggcgttccaccacttgataatcagataaatcttgtaaggataattgaccggggttatccttagcattttggacaaccgaaacgatattttgggcatatttaccagtatgcagagctttttgcaccttgaactgctaacgcctgaacactgtcagcaaattctaaatttttcagcaagctgcctgcttgtagcggcacatcattcggcaaaaaataagcggctgtttttggatagcgtgccaaatgctgccaattttgctcaaccgagatggcaagccttggcgacacctcaaagccttgttttgccaagcggatcggcgtatcaaataattttccccaaggccatacaccgtatcgctgtgtattatctccatcagtttagggatagcaggcgtacccaccgagcgaccaccgaccaacgcttccataaattttaatggctggccatctttatccaaaaataactctggcgtcgcacgcatcggtgccgtctcacgcccatcaaatgtggtcaatgttttggcggtattatcccaatacaacacaaatgcaccaccgcccaagcctgacgactgtggctctactaggcttagtgtcgtctgcaccgccaccatcgcatctgcagcactaccgccttattttaagatatcatagcctgcttgagttactaatggattggctgatgctaccataaaatcacttgcaatcacctgctgttgttcggtcagtcccgttgcatgttcaggcgtgtgagcatctgcacctgtgatgacagcagaattagtattaaccttaccttgattggcatggatgacttgacatccagagattgccatagacattatcgatgcagtcaataaatatgttttagccataagcgcaacttcgtctgagtttgattgataatacatacaaattatgctgattattgtatgtaatatggctaaataattcaatccaaacaatcaatcttgaccatcaaaaaagaccgctaatgtcatcagcagtctttttttgatatttgtgtaagatattaagcaatcagacctctgggctatgctcttcaatgagtggttttaactcacctgattgatacatttgtaggataatatcgctaccaccgattaactcaccattgacccaaagctgtggaaaagttggccaattggcaatcaatggcagggttgagcgaatttcaggattttctaggatattgacaaaagcaaaaggacgaccgatttgtgttaacacttcaatggcacgcgctgaaaatccac

SEQ ID NO: 33 - DNA, 63563 bp, Moraxella catarrhalis
tgcattattgtttttttaatttgggcggtcaggcacatgaattgggtgtcaagcagttggtctatcatctatggtctcgctattctttgtcgcataaggtattgtttattacggtagattttgaacctgttgttgctgagatattaaaaacgattgatgatggccatatggccgttgtcctaaaacgcatgatggtaaaagctgccagtcagattgctcaacaaattaagatccaagcactggtaacacgagatgcgatgggtcagttggatgggcggtcatcaacctgtcgaaatgcgagtgatgcagcatcatctgcatcgattatacgccctttagttaccagtgataacgacgctatcataaaattggcagaatgtattggcacggcaaacattgccacgtcaatgcgtgagtattgcggtgttatgtcagaatcacccacggtcaaggcacttaagtctaagactctggaacaagaagcacatttcaattttgagattgtaaattatgccatacagatagccacatctagtgatatccgagatatgaatattcatgaagaaattgtgactgctgaagtgctgtaacacatcacatcacagcaggtggtattagctattcgtatgccagttgaagtagatgtcaagccacttaagttagatgctgccgtgattacgctgccattttataagttgctatcagaatttgatcaacttgaccccaccaaaacctatttgttatactgccaacaaggcgtgatgagtcgattgcaagcagcccaactattggcaaaagggcatcataatgtcaaaatatttaaaccatcatcaccccaaagtggtctgtaggcatggattaactcatcaaatttcaccctgatatcagcgtgttatcaaaggggtagggtgtgtcatcgttcaccgaaaaaagtttaaaaaatgcttgaaaaaatgcttgaaaaaatgcttgacattgaataaatttggcatataatatgccacacaaagcgggaatagctcagttggtagagcacgaccttgccaaggtcggggtcgcgagttcgaatctcgtttcccgctccaaattttaaaaagtccaaatcgaaagatttgggcttttttgttgttgaagttactcattttaagcattttaaaattaatcaagcaaaagaatttgcaaaaagaaaacaatcatatcaaaggcgttgaacattttgattgtaagctactaaatcgaatagctagaaaatgtaacggtatgtactcgaaagcttttatcttttatcaacgaatataatcttaggtttaacattggtagcgtacttattttgcatgtttgatacatgataagtattgtggctgtaagttggttttataaatgaatatctaaatgtttatttacgctatccaaaaagtccatcggttcttggttttactaagatgcccacataacaaagacaaaatatcacaaaagacgctatccacaatacttgtgataataacatgagcggcatataactatcattaaaaaatagcggtaagaccacacgaaatatgccacacaaaatcatcaacatgaacattaatgacacagtggcagggggctgatggatatttctgccagtatgtccaagcgacacccgagccatcatggcaatcgtcatcagtccaatgccaaacaccgccaaaccatgtagtccaagcgtgtggatattaacagagctaaaccaatttaactgtgtggcaatcggataaagtacaaacatcgccaaacttatcgtcatgccaaaaaatgcaatgatgagtgaccacagcaggggcttttgccagatggcgtggtgataccagttttttaggcgtgccaaattagccatcaaacatactaacgcacacacgccagcaatcatgggctgtttgatgaacaaatcaaaaatgataaatccaaaaaaaccaaataaattgagcctgtccagtagatcggagtttttttgttcaagctgcatgccatttggtgtgccatcatgattgacgctgatgcctttggtaataaagaatggcaaaacacgccgtgcaatggtaaacactacaccaatcaccaaatataaggcaaaatataaggcgatttgctgtgtgttgtgatgatttatcagcacgcccacataaaaagcaacctgagtcaaacctaatagtaaaagtttggtaatgataccaatttgacgtttttggcgaacagcccacaccgctttgatgacagcaaaagcagtcatgccccaaaatatcatgtcaaatacaaaagccgccatgaacagggcaatgctaggtgtgacatgaagcccaaaccagataaagcgagataccgcccacgccccaaatatcgcccccaaatgccagccataaggcatgggctgatttgtccatgttttgactgccgttaataaaaaccctgcaatcactgctaaagcataaccaaacaccatctcatgaccatgccaataaaagggcgtaaccacgccttgaaaaggagcaaacccttgtaatatcaccagccaaagcagcatacttatcacagcaaacaccgccgaacccacaaaaaatatgcgaaaacccaaatttaaaatgggatggggagatgttgggcgtttggcggtgttttggatattcataagcatggcgaatctttgaattgttattacgattgtcgaaaaagtaatctgctgattaaatcactatttttaaaatatcatctcatcaaaaatgaaatagcgtttgtgtggtcattgttccaccatctgttctaggtgttcggattttaaaatagtgtattgtacaccatttacgctaataatttgctgatttatcaaagatcgcaaagttcggctgagtgtttcagcacggatacttagtaggcttgcaagatttttttgactcatggatatctctattttgctgttattgtcagcatggcataatagataataagctactttcgcttgtgcagttttcaggcttaataaatcatacaataaaaactgtgtcgagatttgctcatacatttgctctgcataccaagtaaatatcgtagctaaagacaagttgttgaatgttttctttatttcatgaatgggtaaaatggcaacatagctattttgtgaagctttggcggttaactgatggcagctattttttccaaatgagttatattgattatacgcaagcatctcatcttgtttttcatcacacttatctacttttaaattaggcaggctttcattgatcatctgtacctgatggatatgagttttatttgtatcaaatctgtttattaggctttcttgaccattgggctgctgacgatagcaatggattgcaccttctaataaaaaatataaataacgcactttagcatattgcaaataaatcaaactgcctttggggtagtagtgaatcgttgctgccgaaattgaaagtttcttattggttgttgcaaaaatagggtggcagctcaagctctgaagataaacaacttttttttcatcatagagttttttcatggctaaagagagggtaatttagattgaagtattgtaaatatttacagatattagccatagtatgcttaggtagaaagcagccagccaagcttactactttagggtagtgccttaaccatttagagcatagctaggtattgatagctgatttatgctaaaaccaaatcaactctgggggtgtgcatgcatgtaacattaagtgatttgttaaataacaaccaatattgggcacagtcactgacagcgcgtgatcctgactattttccaagactctcaaaggcacagtcacccaaatatttatggatcggctgctctgacagtcgtgtgcccgccaatgaagtggtaggcgtcatgccaggagagctttttgtgcaccgcaatgtcgcaaatatggtagtttcaactgatatgaatttgttatcggtgttacagtttgcggtagatgtacttagggttgagcatattatcgtatgtggtcactatggttgcggcggcgttaaagcggcgcttagtcagcaagaatatggtctgatagataactggcttagaccgttgaaaggaatgcgttaccaatatcgtgaggcttttgagggtttaactgataaagaggagcttgatttattatgccaaatcaatgttaagcgtcaggtcactaatgtttgccatactaccatagtgcaaaatgcttggtatcaaggcagacaactttcggtacatggctggatttatgacatgaatagtgggctgattgaggacttgggcgtgagtattagtaacgcacaacagctggcatcggcatttatctattcgcattaataaaattaaagcagtcattcaactacgcccaaagaagtatctaatgatagccatttaggcaatagttaggtaaccaataaatttttataatcaatgttagcttggtgtttcgattgtcgctagccagctaagctctttttataataacgaggaaagcaaaatgagccatttactcgaccaactgcgattttttaaaagaaaacaaggtgaatttgccaacagccacggtgagactcgccatgaaaaccgtgaatgggaaaacagctatcgggcacgctggtcatatgacaaagtggtgcgttctacacatggggtgaactgcacaggttcatgctcttggaaaatctatgtcaaaaatggtctggtaacctgggagacacaacagacggactatcctcgcactcgcccagatttgcccaaccatgagcctcgtggctgtcctcgtggggcaagctatagctggtatatgtattctgccaaccgcttaaaatacccaaaagtgcgtaaaccattattaaaattatggcgtgaagccaaagccaaacataccgatcctgttttggcatgggcaagcattgttgaaaaccctaccaaatctgctgaatacaagtcaaaacgaggcttgggtggttttgtacgctcatcttggcaagagtgtgcagaaatcattgcagcagccaatgtttacaccgctaagacctttggtcctgaccgcatcattggtttttcacccattcctgcgatgtccatgctcagttatgcgtcagggtcaagatatttatcgctcataggtggtgcatgcttgtcgttttatgattggtattgcgacctgccgccagcttctcccatggtttggggtgagcagaccgatgttgctgaatctgctgattggtacaattccgattatatcattgcgtggggttcaaatgtgccacaaacccgtacgcctgacgctcacttttttaccgaggtgcgttataaaggcacaaaaacggttgccattaccccagattatgccgaaattgccaaactttgtgacctatggctgaacccaaaacaaggcacagatgccgccttggctcaagcattttgccatgtcatcatcaaagagttttatctgaaatctcaaagtgattacttccaagactatgccaaacgctacacggatttacccatgttggtggtgcttgaagaaaaagacgataagtttaaagcagggcgttttttacgggcatctgacttaattgacaatttaggtcaagaaaataatcctgaatggaaaaccatcgccatgaaccaaaatggtgagcttgtttcaccttatggttcaatcggttatcgctggggtgaaacagggcgttggaatttggaaaataaagaaggtcaacataatggcgacgtggatttgactttgtcattaaaaggttctggcgagacggcaagcgttggtttggactattttggtggtgatgaacacccctattttaccgctgccgctggtgatgccattcagtataaaaacattccttgccataccatcagtcttgccaatggacaaaccgccaaagtcgccaccgtttttgatttgatggttgccaatttgggggttgataatgggcatggtggtcaaaatgtcaccgatgattacaatgatgccaacattgcaggtacgcctgcttggcaagaaaaaatcactggtgtcagtcgtgaaaaggtgattcaaatcgcccgtgaatttgccgaaaatgcccacaaaactcaaggcaaatccatggtcatcatcggagcaggcatgaaccactggtatcatcttgacatgaattatcgtggtgtgattaatatgctgatgctctgtggctgtattggcaaatcagggggtggctgggctcactatgtgggtcaagaaaagctcagaccacaatctggttgggcgcctgttgcgtttggattggattggcacagaccaccacgccacatgaatagtacaagctttttttacaatcactcaagccaatggcggcatgaaactgtctctgcccatgaattgctttcatctcatgccaataaatcgcaatttccagagcatatgctcgattacaacattaaagctgagcgggcaggttggttgccatctgccccccaattaaaccaaaatccactgaccattgccccccaagcaaaagccaaaggcatgagtgttcaagattatgtggttgaaagtctgcacaatgggtcattgcgttttgctgccgaacaacccgacaatccgcaaaatttcccacgcaatatgtttatctggcggtcaaacttactgggttcatcaggtaaagggcatgagtacatgctcaaatacttgttagggacaaaaaatggcttattgggtgatgaaacggtacaaactggctttaaacccaacgaaattgactttgttgaaaatgccccaacgggtaaaattgatttggtaaccaccttagactttagaatgtccagcacatgtttgtattctgacattgtactgcccaccgccacatggtacgaaaaagaagacatcaacacatcagacatgcacccatttatccacccattcaccgctgccactgaccctgcgtgggaagcaaaaactgactgggagatttataaatacatcgctaaggcattctctcgcctttgtgttgggcatttgggaacacaaaccgatgtggttaccttacccatgcaacatgacagtgccgatgaattggctcaaccctttggtggcacagattggaaaagtgcaggtgaaaaacccatacccggcattaattgcccactcatcaaagttgtggaacgagattatcccagcacctatgccaagttcacttctcttggtcctttaatggacaagcttggtaataactctaaaggcattgactgggacaccaaagaagaagtgcaacaattggggcagttaaattatcgcattcatgatgacagcgtcgccaacacacgccccaatatgagcagtgtcgtcaatgccattgaaaccgtactgatgcttgccccagaaaccaacggtcatgttgcggttaaagcatgggcagaattatccaaaaaaacaggacgtgaccacactcatttggcaaaagccagtgagcatgaaaaaatccgctttaatgacattgttgcccaacccagaaaaatcatttcaagtcccacatggtcagggcttgaatctgacaaagtcagctacaacgcaggctacaccaatgtgcatgaactgattccatggcggacaatcacaggccgtcagcaattttatgttgagcacccttggatacaagcctttggcgaacaaatgcaacaataccgtccgccaattgacaccaaaaccacccaagcatttaaaaaatatcaatccaatggcaacaaagaaattgtgcttaattttttaacaccacaccaaaaatggggcattcacagcacctattcagaaaacctattgatgctcaccttaagtcgtggtggtccaattgtttggataagtgagattgatgcccaaaaagcaggcattgaagataatgattggattgaagtctttaatgccaacggggcaatcaccgcccgtgcggtggtcagccagcgagtcaaagaaggcatgaccatgatgtaccatgctcaagaaaaactggtgaatatcccaggttctgaaaactcaggtactcgtggtggtattcacaactcggttactcgcaccatcttaaaacccactcacatgattggtggttatgcccaattctcttatggctttaactactatggtacggttggttgtaaccgtgatgaatttgttgtggtgcgtaaaatggcaaatattgactggctagagggcagggctgatgatgaattgccacgcccattacccaccactttggactgatgattttacaacatatcatgacacattttactaagctgtcgctaggtcaaggaaaattaaaatgaaaattcgctcacaagttggcatggtgttaaaccttgataaatgtatcggttgccatacctgctcagtcacttgtaaaaatgtttggaccagccgagagggcatggaatacgcatggtttaacaatgtggaatccaaacccggtatcggttatccaaaagaatgggaaaaccaaggtaaatggaaaggtggttggatacgcaatgcagatggctcaattaatcccaaaattgggggtaaatttagagtgcttgccaatatttttgccaacccagatttgcccatgatagatgactattatgaaccatttgactttgactaccaacatctgcataccgccccaattggtgaacatcagcccattgcacgccctcgctccttaattacaggcaaacgcatacaaaaaattgaatgggggccaaattgggaagagattcttgggtcagagtttgctaagcgtcgccgtgataagaattttgatgacatacaagctgacatctatgggcaatatgaaaacacctttatgatgtatttgccacgcctatgtgagcattgtctaaacccaacttgtgtggcatcttgtccaagtggggcaatttataagcgtgaagaagatggcatcgtgctgattgaccaagacaaatgccgtggctggcgtatgtgcatctcaggctgcccttacaaaaaaatctattacaactggaaatcgggcaaatcagaaaaatgtatcttctgttacccccgtattgaagcaggcatgcccaccatctgctctgaaacttgtgtcggtcgcattcgctaccttggcgtattattgtatgatgcagacaaaatccacgaagttgccagcctatcaaatgaacaagatttataccaagcacaacttgatattttcttagacccacatgaccctaaagtcatcaaacaagccttacaagacggcgtgccaatgagcgtcatcgaatctgctcaaaaatcccctgtctataaactggcagtcgattggaagcttgctctgcccttgcacccagaataccgtaccctgcctatggtgtggtatgtgccaccattatcacccattcaaaacgccgccgaagcaggtcaagtgggcatggacggactgattccagatgtggacagtttacgcattcctttaaaataccttgccaacatgctcaccgcaggcgatgaagagcctgtacgcttggcattaaaacgcctgcttgccatgcgaagctataaacgcctacaattggttgaaaaacaagatgctcaagaagtgttagacgctgttggcttaagcgttgcccaagtggaagatatgtaccgctatcttgccattgccaactatgaagaccgttttgttatcccaaccgctcaccgtgaagaagccctaagcgatgcgtttgctgaacgcaatggttgtggctttacctttggtaatggttgtacaggaggtaatgacacccacatgtttggacaaaagaaaaataataagcgtgattttatcaaaaccgtacaaacatgggagctataaatgacatctgccacagacatgaaactgcttaaagtcatcagcttgctcatggattaccctgaacacgagctgtttatcgatgataacttagaccaatgcaaacagcttgtcatgcaaagccgtcttatcagccctgaggtgcgacaagacatcgccaccttaattgaccagatggctgcactcggtgagctagaagcacaagccaaatatgacagcctatttgagcgaggtcgttccttatctttatggctatttgaacatgttcatggtgaaagtcgagaccgtgggcaagccatggtggatttaatggctcaatatgacatggctggatttgagattaacgcaaaagaattgcctgactatctaccgatgtatttggaatttttatcccaccaagccaccatcaaccatgatgagatgcagattcgtgaagaaattgccaatattagccacattgttaccttattggcggctcgcttaatggataaaaacagccactatgttggtctatttaaagcattgttgcaaatcgcaggtgaaccactgagtgtcattgaccaacagcttgccaaaatgcacaaagacaaccaacctgctgatgacaccaccgaagcgattgacaaagcatgggaagaagaaatggtggattttttaggagcagaacaacaaaactgcccatcaaaccaaaccaaacagcgtatcgcaaacctacaaggtgaacacgctcaacgccaagccgaagttcctgtgcattgggttgacttcaaccaatccgccaaagccaccacacaaggagtctgattatgaacacaacaaacccagaagattggttacatgtctttttatttggcatttatccctacatcgccttgacagtgtgcatctttggttgttgggcaagatttgatttgtctcaatacacatggcgtgcaggctcaagtcaaatgctgtcagataaaggcatgcgattggcaagcaatttatttcatattggcatcattgtcgtattgcttggacatttttttggcatgtttaccccccattttatttatgaacgcatcatcaccgcaccacaaaaacaactgatggcagtgattgttggtggcattgcagggataatgtgcttaattgggcttatcatgttaatttggcgacgttttaccaacccacgcatcagccacacctcaacttttagcgataagatgttactgttaattattttgcttcaattggtcatgggacttgcaaccatttggtcatatccgacgcatcgtgatggtgcattgatgttaagcttggcagggtgggcacaaaacttggcgatattacgcccagtctacgccgcttcattggtagaagatgctggactggtttataaaatgcacatgttcttaggcacaaccttaatcttacttgtgccatttactcgcttaatccatatcatttctgccccaatttggtatcttggcaggcgttatcaaattgtccgccaaaagagatctcagtaagtaatacggaataataacaacaataataaaatactgtgccattgccacaaagactgcattcttgtctttgtggttttttatcaccagaaagtgtctttaaaatgatgaatttgcattctcctaaagaagtatggtgaatagactctttattttggataatgattttattatccatattttcattgtaaccattattagaggtcttatgagcgttggaacctatataccgactcaacaaacaattcaaaatatatgcgcagatgaacataatgattctgctaagctcatcaaagtattgaatatagagaatttggctcaaaaaagcgataatattcgtattatgccaacttctaaagacttgggcagaccttcatctgatgctcaatttatcaagcaagcattagataaagaaatttttgacagcaccaatctaatcgcctcaagccaccaaactttaccaaatatcactgtaaatggcgtagcaatagaccccaaagcagtagctgccgaagtgcagtatcatcctgctaatagccaagaagaagcattgtttttagcagctcaagccttagttatgcgtgaattactgcgtcaagaagtgattgagtgcttgggcgagagggcgtggctagagaatgaagaagctaccatcgctaagctgttagagcagcaagtcatcgccaaatctccagacaaggcaagctgtcagaattactatcatgctaatcaagttgaatttgttagtatgccaataatgacgcttcgccatattttgcttgcgtgtccaccacaagagggtgaagagcgcattgaattaaaaaagcaagctcgccaattgatcgatcggcttaatcaaagccacaatcgagatagtgattttattgagtttgcacgtcgatactctgcctgcccttcaaaagatgatggcggtgaactgggtgtattacaaaaaggcagtaccgtgcctgaatttgagagtgccgtatttgctttgccagttggtatcagtattaatccgattgaaacacgatatgggatccatgtgattgaagttctacaaaagcaggagggtaggcagctgagctttgaagaggcatatcctatcattgaaaatcatcttaagcagcagtcatttcatcatagtttgtgtgactatttatttgaattgagccaaaaggctgatattattggcattgagcttaagatgaatgagcaaaatatatatcgtggctgatttataataaatttataaaaggaaaacacatgattagtgtagatgagcttcaaaaatcaattatcagtcgcgtggacgagtatttgaatattgataatcctttggtatccagacagagggtagtactggctttaaacgatgcacttaatcacatattggcagttgatattaatgcgaatctcgatataccacgccagaatgtttcggcaatggatggatttgccttggttgcacaaagccaactacagcagggtgatggttttaccgtcataggcgagtcttgtgcaggcacgccgtttagtggcgagattttgcctaatcaagcggtgcgtatctttacaggagcggttgtaccagagggttgtgatacggtagtgatgcaagaacatactacttttgatcaaattaacataactgataaatctcagccttattacattgtactaaccaagcctgctaaagccagtgccaatatccgctaccaaggcgaagagattgctcaaggcgataccttgcttagtgcaggtaagcgtctgaatcccagtgatattagtctactgtctagcatgggatatgatgaaattgaagtgttttcaccacttagaattggtctaatagccacaggcgatgagctggtttccattggtcagccattgagtgatttggctcagatttataattcaaacacaccaactttaaaggcactattaagaaaattgcctatcataatcaaggattatggcattgtcaaagatgtgtttgatgagacttatgaagtggtaaagcgtgccattgaagaatgtgacataattatctctagcgctggtgtttctgtcggtgactatgattttttaaccgaagtggtgagaagcttgggtaaaattaatcactataaagttgctatgaagccaggcaagccgtttgtttttggtgaatttgctgctgatgcgcgtaaagtgttatattttgggttaccgggcaatccactttctacagtagttggctgtattaactttgtgcgtccagcactatggcaggcactaggggcaatagatgcacctcttaccttacatctgcctgcgattacgacggcaaacatcaagaaaagtgtaggtaggcgagagtatcagcgcggctattttgaaatgggtgaaaaaaaattacaagtcacaccatcaagtgcgcaagactcgcaccgcatcaaacaattgtctcaagccaactgtctaattgtgcttgatgaaaatagtgtgggtgcgaataaaggcgagcaggtgataattcagctatttgattgggtggtgtgagttgcactgaccatttgattttataagtaataaatctcatcggtcagttgctggatttctgatttgtcatggctgacatacagcatgggaatgtgagtggtgtggataatctgctcaaaaaatggcaaaatctcttgtttgtgaatgctgtctagggcggataatggttcatctaaaagtaacaaatttggtgaataaagcaacgcccgcccaagtgccactcgctgtttttcaccgcctgatagtttggtgggcatacgctgggtcagatgccccaattttaacagctcaatgatttcatcagggtgaaagcgtctttggtcatcatcaatgttgtgatagccaaatagcaaattattcatcaccgatttatgggggaaaatttgggcatcttgaaacaccaagcccactcgtcgctgctgaatgggtatgttgatttttttttcgccatcaaaccaggtttgcccattgatacggatactgccattttttggggcatttagccctgcgatggtgtgtaaaatgctggttttgccagagcctgaaatcccaaatagccccatgacaggctgtgatgattgtaaatcaacggataaatccagcctgccaagcgctagctgaaattgacaatcaaatatcaaagggtcatcttttgatgtttgtgcggtttgtgtttgtgcggtttgtgtcattgtgcaagccttcttttttgataacgggcataccactgcgacaaccataatgccgaaaacgccaccccaaccgacaacatcaacaatcgcatgatttgggcgtcgctgtcaggttgttgtaacaggctataaatcgccaatggcaaggtgcgagtctcccccgatatgttgcccacaaaggtgatggttgccccaaattcgcccaaactgcgacaaaacgataaaatcgccccaatcacaatcccagcacccgccagtggcaaggttatctgaaaaaatgcctgtaaacggcttgcccccaatgacatggcggtcaattcaaggcgtttatccaccaattcaatggcaaggcgtaccgattgcaccatcaagggaaatcccatgactgctgatgccagtaccgcccctttccaattaaatgccaaatcaaagcccaactgtgataaatattgcccgatgaccccttgattgccaaataagaccagcaaaatatagcccggcacaacagggggcagaactaagggcaaaaacacaagggtttcaaataaagacttgccaaaaaaatctttgcgagccaacagccaacccatggcaatcgctggtaataggttgaccagaaggctcacgcttgcgatttgataggacagtttgatgacttccatctcatcaggcgacagtgttaggttcatgattatacaaaaccttgataaaaatgattacaatacactaaaaccatatttgcgataaaccgctttggcttctttggtctgtaaaaagttataatactgctgggcttcacgactttgcttaaccatgctgatggggtagacaatcggcgtgtgtgtggtgattggaaaggtgttaatcacttgcacatttttgaccactttggcatctgtggcatagacaatgcccaactggcattcaccacggttcacaaagtttagtgcagcacgcacatcttcggtctctaccaaacgtggcccgatggtgtcccaccaacctaggttggttagggcttctttggcgtatttgcccacaggcacgctggcggtgttgccagtgcatagcttgcctgtaaaggcattaccgatgtcaaaggatttgtctattttgatgttggtcttgatggggttgtttttgggggtaatcatcaccaagcggttgcccaataggtttttgtagctgctgctaacaatcttatcttttttggcaagataatccatccaagaggtgtttgccgagatataaatgtcagcaggcgcaccttgctcaatttgtttggcaagggtagatgaggcggcaaaggaagtttttactttgctgttgtattttttttcatacaacttattgatgtcttcaacagcattggtcatgctggcagcggcatacacggtaaggtctgcatgggctgatgttgcccccatgaccatcatggcgatgaataaaggtttgatggctgatttgatggttgctgtcataacatgctcctgtttgttctgtggttgtggggtttgggcgttactttttgacaccaaggacgatgtgtgatgccttaattaaagcagtaacaggcgaacccacggctaggtttagattttgacagctttggctggtgatgatggcactaatcactgtaccgctggcggttttgatggtaatttcggcattcaccgcaccgtcggtgatgctctccaccgtgccttgcaattggttgcgagacgataaaatcagctcatcatctgttgcgacgatgaccgatggggctttaaaaatcgccaccacgctgccaccgacagcaaggttaaggcgtttggtactctccgaggtaatcacggctgttaattcatcgccatcggttaagctaagtttgatgacatcattgactgcccctgatcgaatgtgtttgatggtggcgttaagttgatttcttgcactgattgccatgggtgttcttcttgattggcggttgataaaaattgattatgataatggcttaaccattattacttagccataaactttggttactgtcggtataaaattcttgcttccatacaggaatgtctgctttgatggcgtcgagcaaccactgacaagcttcaaaggcgggatagcgatgatgagcgctaacgcctatccacaccgccatatcgcctatgttcagatcaccgatgcgatgcatggcgatggcattttcaattttaaaacgttgacaggcttcactgatcaatagctttccttgattaagtgccaatgcctcataaccataataggtgagcttctctactgggcggctgttgttatggtttcgcacccaaccttcaaaggtcactaaagccccacagcggtcatcaagcaaacctttttttagcttcttctcatcgataaaggtgtctaataaggcaaatccatcagtgattgccacatggtaggcagcttcatggcttaatgagatctttgatgagccttgatgtagtttttgagccatattaacctccagcgacaggtggaatgaaggcaatgatatcaccattgctaaccttagtctgccaattggcaatctgatgattgacagcaaccgccaattcatcttgtgttaaattaaaatcgtatttatctaataaataagaataaatatcattaagataataatgcgaggttgttaaaatttcttcatctatacctgcctgttcggcaagactggcgaaatataatacagtaacagttaagttatttgacataatcagatttccccccagttttatttaatagacaaacatcggtaatgataatgtcgtggctcattgctttggtcatgtcatagatggtcagacaagctactgatactgctgttaaggcttccatttctacaccagttttgtgagctaccttgacagccgctgtcacaacgatggcacattttgcatcattatattcaaagcttagcttgacactatcaaggggtaactgatggcataaagggattaaatcgctcgttttcttagcacccataatacctgcaagatgagctgtttgggtaattgaccctttttttgtcatgccatcagtgtttttgatggctaaatagatatttgaaggaaaaattacctgagcgcttgcggtggcactgcgctgggttactattttggttgaaacatcaaccatgctaatatcaccattggcgtctagatgagttagggtgtggtgatctaaatcagtcataaaaattttccaaagctaaggcaaattcactgggtgtgttaaagttagtcaaagagtgtaaatcatcattaagatcaaaagtttggcggtcaacaaggtctaaaaattgcatgactgagcgaccaccctgagccagaaaatcaagtaatattggtagaatactggtgtggtaaacccctaataaggggcagtctttttttgcgtatagatagccaacttgagcactggtaaactttaatatatcagcaattttatcaatcgctagcaaatgatcgcagctaacagttaaaatatagccttcgctttctaccgcctgtaagccagcagtgatgccggataaaggacctgcacctttacctgaatcattgcaaggcaaataatctttaagtggcgtaatgagtggatcatgtgcggaatttttaccgttatctgccaaaaaaataggtaagtttaattttttggcacaagcgatatgaaaatcaagtaccgtacttttgttaggtagggcaagctgtgctttgggttgtcccattcgagttgactctccccctgctaaaattaagacagcgcataaactcatggcttaattccgatgttaagcatcatattatagttaccattaaactgagaatccaaatctgccactattagccatgcgatggattttgacgcattaaatgtggtacaaagttacaaggacgagttcggttatccagctgctgtttgataataccctcccagcctgttcgacatgctcctgttgatcctggtaagcaaaaaattactgtgttgtttgccatgcctgccactgctctagattgtagggttgacattccgatttcgccatgagataagtatctaaacatttcaccaaagccttgcacttctttatcaaatagcacgccgactgcttctggcatgttatcacgatgataaaaacctgtaccccctgtggtaataatggcatgaatacgttcatcagcgatccatgcactaatcactgcacggatttgataaatatcatctttggtcagcttgcggtcaaccaatacatgacctgcctccactaggctatctaccaagaattttcctgaagtatcttcgtccagtatgcgagtatcagataccgttagtacagcgatgtttaagggagtaaatggtttatcggattttttggcttgtggttgatgattagggtcattacataagttacacataagatgtcctgtgggttaattaaagtatcaaatcaaagttagggtcttagggttttattaaaaattttttgtttccagctgctctcaaggcaatcaatgttcagccactgattggcagtaacggcatcgattttgcttttttgattcactatttgccaaagagtgtgcaaagtggcgtattcaaaagggcgttcgataaggtagacggataagtcaggcttaatgatgcctgttttgatcacttgataataccacccagcaatgccttgatgactaacaaaagaagatatgtttggagtgtttaatcgatcattgatcttataacaaggacggcgaggctgcactagccgaagctgtacgcaatcatctgcatcaccgaattgatagatatcgccaatgcataccgagcgttcgtccatcggtatcttatcggtaatgacggttaaattttctccgagtgagccaacagggatgttcaaaccaaacgcctgattgatgacatcataggtggtgattggcatttgatgcactgctttgagtggtccaccgtgaaatttatgctcagcttgttcgtctgcatctagacccagtaaatcaactttcatgctgccatcaatgggaattttattaatagcactcacgccacgcacaaacggctcaattttacctgtgcgtacggtggtcagagtgccaataaatttaggtagagtattcatttcctgcctcattatgtactgatgatttcagcaatcagtgaaataaccgatcaatcacactttagccgcctaccaaggataaattatacatcatgccgctgtcggcagagtgcaggtgatgatgttcaggtttgataggcattaaggcttgtaaagcttgaataagcccctgggtgtcaccttgtgtcagataaggacgaatgtcgtaattttggctatcaaacaagcaaagatgcacttgaccttgactgctaacacgtaggcgattgcaatgatcacaaaatttgggtgaataaggttcaatcagaccaattttaccgacataatcagggtggctgtattcagttgcaggtccaccatccgttgcacgcatttgagccctccaaccgtgcttgattaaataggttttgatatgctgactgctagtatgttcggcaaaaaacagttggctattatctgatgtttgcataaattcaatgaaacggtaagtaatggggcgatctttgacaaagtccagtgctgccataagattgtcataggcggtatgtgccatcaaaatgccgttgagctttaaggtgatgctagttgagtataagagtttatcaatatcacgaagtagagtaggcaagccatcatatcctgtaattttatgaaatgttgtgggattaaaactgtcaatacttagatttaatttatctaagcctgcatcatgccaagcggatagatgtttgcctaatttatagccattggagctgatacacgcggtcttgataccctctgtatttttgatgagtctgatcaagtcaggcaaatcatggcgtatagatggctcaccccctgtcagacgaactttggtggtgccaagagcagcaaatcctgccaataaagtagcaatttcttgttgtgtcagctcgttattaggacgtttgccttgatagccattaggtagacaataattacaacgaaaattacaaaaatcagtgatagaaagtctaagataggttagtttacgctgaaagttatcagtcaatttttctgttgagttggatgttgctagggtaaactcattgccataaaataccgtgtcaaaacaatccgtcgcttggtgggctggctgcgccggttggaataataaagagtttttcatgacaataacttatgggcgttgcctcggtgatgaatgtattacaactataacaaaaaatacccaagctccctatagccacatggttaaaattttttgacattctctactactttggatgtatgtgtcactacaatgcttgattatttcgcttatcactgataatgaccaaccgcccaaacggcaatctcaacgcgcgtacgcaggccaatcttaccaagaatgtgtttgacatgaactttaactgtggattcagcaataccaagcttgttaccaatcatcttattactcatcccttgagcaatcattttagcaacttggatctcgcgctctgtcagctcgtgactgctgtcagttttaacaggtttacgcatagcttgtgctaaaatcggtgcaagacttgggctgatgactaattcaccgcacaaaatcttacgtatatcagtaatgatttgctctggctccatatccttgagtagatagccatcaacgcctaaatgaagcgcatcttgaacatctttgctattgtccgatacggtaaataatagaactttggtttgaatacccaactcccgtatttttttgagcgtttcaatgccatttaagataggcatggtgtgatctaaaatcacaagatctacaatttcttgatttagaatatccagggcttccatcccatggttggcttcagcaatgacttgaacatccttttctagacttaataaatctgccaaaccacgacgtagcatcggatgatcatcgacaagaagaaggcgtgcaggattggctgcggtaaaaatctttaaaaccatgttattcctagttctcataaaatttaggtaaaaaccaaatacgcaccaaagtgccctttggggtgttttgactgatatcaaactcgccacccaaactgtgcgtgcgctcttgcataatttttaatccatgatgctgttgttcatcaatatgctttggtaaacccacgccgtcatcaccaatttccagataaatacgctgttcagtgtctaaatgtgttttttgataaaggctgacagttacctctttggcgtatgcatggcgctgaatattggataatgcttcacgaataatttgtaataagtcaatttgctcattagcacttagattttggcttaaaatccgattatctaatgtaatattaaaaccacctttcgcagaaaattcgtcacaggcctgttcaatggcattatcaaaactgcccgattctatttttaagcgaaaggtcacaagtaactcgcgcagctgaatgtaggcagcatcaagccctgaacgtgcttgccctaaaacttgaagcatggcttcattatgatccatgagcgtatcattttggttttgttgagctgcgtcagaaagttggcgcgcgtgcgtacctagcatagaaagctgaatttttagatatgacaatgactgtgccaatgagtcatgtagttcgcgggcaatggtgttccgctcttctaaaagtattaattgatgctcttgctgacgttgtttttggatggtgaatactaggcttactaaacttaccaacacttgtacaagttctttggtaatggtggtatcatcttcttcagactgctgatgaaccatcagctcgccccagtagttgttttgggcgctgattggataaattcttgtcgtagatctggctttaagagcgcattgatcgcagttgcctgtagaacaaatttcactcgacaaaagatcggttttgcctgtttgcaattcttcaacagagtgactgtgaatactaatgctatctttagatgacacaagcacagtgtcatttttcaagagaggtcctgaagtgctagattcatttaattttaggtgatcatgcaagcataatgtaaacccaaaacttggatttatctttgaaaaattctcaagtaaatgatgtagcttagataatgtaacaggctcttgattgagctgattggaaaaatcatacaatagtttaagcaattggttagcttgggtaagatgccgagttttgtttaacacttcttgattgagcttggcttgatgttcgctaatggtatctgccatatcattgaatgagttgctaagcgtttgaaactcttgatagccagttaccagcgcaggcacatgatgaccgcgtctgaaatgctgcgtactgtctatgagaaagtgaatgggtcttagtacattacgccgaagctcatacatacctaataatagggttaataagatgataccaagcgcagacatttgtaatacttgttgccagtgctggcgggtttcactgcgaacctgaatttttttagttagctcgtgaacttctttaatgtatttaccagacgccactaatactgcggtactatcattatttactaaagcaggctttagcatctttaaccaatggtgttgaattgttttagtttggctatctatctcagtgtccttattgccaggcatattctgatatgcatacagcacattcaaacgcgcttgcatatcatcaatcagttgttgattgatcgataaggtaggatcaagttttacatgatcatcaattggtaaagtggtattggttgttaataaataattaatgcgataagttgccatccgaattgatccgacagagttgagtgcttgagcatcagattttgatacccaggctaagactgctgaagtgctggctgtgactgtcgcaaaaaatacaataacgccaactgccagccaagcacgcactgaaagcgattttggcaaaaagccactaagtcggttatttaacatacatacccccaaaaagccaagatctgctgtttgagtaaaaaatgattgattgtaatcaggttcttaaaaacaagttcttgaaaaatcaggcaattatacactaatccttatgaagaacgactacttcttaagtagtagaaatctatattttagacataagagcattaatttatgattgatttaaatcaactaattcaaaaaaatttcaatttattatagcttgtgtacttttgtaaagctgatttatttggagagattttgatatccaaataaaatctgtttttagcatcttttaaaaagagcctatcatgacaacaaaatctaccattgtactcatctcgtcgaccgttgcatttacgatatgttttatgacttggataatgtttgctgttttgggtatccctattcagcaagcacttgacttaaatgaaacccaatttggattacttgccgccacgcctgttttgacaggttcgctagttcgtttaccgctgggtatcatgacggataaatatggcgggcgcattgtatttttcgtcttaatgttagcgacagtattgccgatctttttaatggggtatgctgatcaatattggcaatttttgttattaggcttgtttgttggtttgtcgggcggatccttttcggtgggtatcgcctatgtagccaagtggtttgaggcagacaagcagggctttgccatgggtgtatttggtgcaggtaatgcaggttcagcgattactaagatgatcggtcctgccattatcgctgtaggggcgtccacagcagccagtgctgcagaaggctggcgttttttacctaaagtttatgcaggtattatgctgattacagccataggtttttggttttttagttatgataataaaacgcatcgtactgccagtaatgctactcttgccagtcaactggctgttctaaaggataagaatgtttggcgttatagccaatattattcgatcgtttttggtggctatgtagcactggcgctttggatgaccaagtattatgtcggcgaatatggttttagcctacaaacagcagcatttttggcagcgtgttttagtttgcctggtggggtattgcgtgcactgggtgggtggctgtcagataagtattcggcacacacagtcacttggtgggtactttggtcatcgtttttgctactatttgccttatcctatcctcaaacattcttgactattcagacagttgacggggaaaaaagcttttatattggcttaaatgccatcgtctttactgtattgattttcttgctaggtattgcctttgccattggtaaggcatcggtatttaaatatttgtctgatgaatacaaggataatatgggtgcagtatcaggtgttgtgggcttggcagggggtcttggcggctttattctaccgattatgtttggtgccgctgtggatatcacaggtattcgttcatcggcgtttatgatcatgtttggtgtggtgtgggtgagtttgatttggatttatttatcagaggtcaagccaaaaatagaacaagaccatcaatcaaaaaccctaaaattatagctaatattttggagacctaaatgaataatcaactcaaaggtggtcgtcgcatcgatgactggcgtcctgaagatgaaaaattttggcaaaatggcggcagccgtgtcgctactcgaaatctttttatctcaattcctgcactattgcttgcattttcggtctgggttatctggagcgtgattgtagttcgtatgcctgaagttggctttcaatttgataaagcgcagctgtcttggcttttggcactacctgccttatctggggcaaccatgcgtttattttatgcgtttttagtacctgtttttggtggtcgccgctggacgacactgtcaacagcatctttgcttatacctacaatttggttgggtttggctatacaaaaccctgaaacttctttcaccacatttgcaatcatcgcactattatgcggtttcggcggtgccaatttttcatccagtatgtctaatatctcatttttttaccctaagtctaaacaaggtatggcgttaggcttaaacgcaggtttgggtaatttaggggtatctgtactgcagtttgttgtgcctgtgatcatcggattttctttatttggtgcattggcgggggatggccaggttactgaatctggtaaagttttatatttacaaaatgctgcttttgtttgggttattccaattgctattatgactgtacttgcatggtttggaatgaatgatttaagcaacgccaaagcgtcatttaaagaacagtcaattatttttagaagacaacataattggatcatgtgcattctttacttggcaacttttggatcttttatcggctttagtgcggcgttccctatggttattaagcagtcgtttcctgagatcgatcctctaaaagttgcctttctaggtcctttggttggcgctctatttcgtcctgtaggtggttggttgtctgataaggttggcggtgcgtgcgtcacattctggaattacattattatgacaattgctgtcatcgcagttatgtttttccttaaaaatggtaattttacaggctattttgctgggtttatgttgctatttatcaccactgggattggtaacggctcaacgtttcgtatgattcctgtgatctttcgaaccatgcatgaacgcttacactcccctgatgctattacacaagcacgcaaagaatccgctgcagttgtaggtttttcggcgggatttgcggcatatggtggtttttttatcccaaaaatgttcggttcaggtctgggggtaaatggcaccttccttgtactaattgcattttatattatatgtatcgctttgacatggtggtattattcacgcagaaatgccccatatccttgttagtattaaataaaaaacggcttattgataaaagccgttttttattatttcttcattttaaattaggggctgtactagaataactctcatgttatactagttttatgaagataacccattgtaaactcagtaaaaaagtacaaaaaagactgcttgaattttttgtacttgaagctactgctcgttcggcagctgatttgctacaaatacacccaaattcagcagcttgattctaccataaaatcagacttgtgatagaataccatcttaatcttgaggctaaagaattgtttgatgacgaaatagggcttgatgaaagctattttggcagcattcgcaaagtacaccatctaatcagcttaaagtattgagaagatggtgtgggatttgggctaatctagtacagcccctaaattattatagcgcgatagatttttgacaaatagggcaggaggggtttttggtaaacttcattttttgaaaattggcacgagaaccttgccataccatcagcgtatcttttaaggtattttgatctttaccgagaaaatgtaaggcgatgtcagcaccaagtgcaccgatcaccgccaccgtacttgctaagacaccagaagttgcacagttttgggctgccctcattgaagtaccaaataaacatgcatagcagcctgttttttttggctcaaaaagtgcaacttgcccagtttcgccaatggcggacaatgaaagtagggctgtactggttatgatcgaatggcggttaagtgtttgacgaatatcgaaattatcactgcaatcaatccataagtctgatttaatagatattaagttttcttttatagtatcatcattgagtgcaatattatgactatggactgcagcccaagagttttgttctatcagtgcttgtttagctatttgtgcttttggtaaaccaatatctgcttgagtgtacaacagctgtctttgtaaattactgtcatctatggtatcaaaatcaaataaatgcacttcacccacacccgctctcactaaaatcggagcaaccatacaacctaaaccgcccattccaattagtgaaacggatgattgcttaattttaagttgtgattcaatatcccatccgtctaataaaatttgacgactataacgcatcagttctgcatcacataattcggttttggggtggggtttggtattggtattcatcataggatatgtatcgaattatcaagaaatacagtttgctcagattatcgtgttatgtcaatacaacttttgggtaaataatattgtcgtgagttttagacaaatgatttcataatatattttagagggattattttgtgtagcgaactacagacataatgttagattgcaaaaaaacaatttgaataatttgcgttaaaaacccgttaatgaattggatagtacactaaagttgatgacatacatttagataattttatttaatattatatttaataaatataacttattagactatatatcacccaggtaccatcgggagtttgtgccctccaacacccttggcaattattattattcatcgtagcaccctgtttataatcatcagcggtaggctttcttcctaaaaactgttgggcaaaatcatctgctactttattcggatctgtacttttttgcatttctctgggttggccaatctcacccttcccagggaataccccctgtcgtaagtcctcaactgctttcttgttggtttgctgataattactgctagtattacttaacggcttttgagctttcgctgaattatttacttgcgttcgactaccacctctaaccgactgtctcgaaaccgcattataagcttctacaacagaacctgaaatttgatggcctgcagcagttacagcagccattggtccatgaatataagtaataagcgagctttccaattgatacaaatactcaggagtacccgcatgttcaatcatatatcgatatttttgagatctcaaatgattacgacaggtattatctttacactgacgattataatgctcaataatttgtgtaacgctattttcccatgctactatttcctgagaagtcatgccagcatgttcatagctgacatatttccattgatgtatgattgcatcgcaagctgctgaagatccagaggagcaaaatgtattataatgcagataaaagttttttatgtcatcagattttactaaagcattattctccaccgcctctgctgccacaccagcagccacattgacatcttcaccagcaaaggcagcggtgatgcctgcaatcagtttggcttgattgatgagtttgtctttttgtgcttgggttagggtgtttgggtcatctacttgataatctccccacatctcaccaacgacagcaccgatgctgcctgcttcacaacgatttcctgccgctttggcagatagacagcttgttgggctttaggtcgagctattcttacaaaaaccaaaaatttcaaaacattttttcataaataaattctgaattgctgctattagcttagcctgagggttttaacattaaatttttaacaaaaattcaccataattttttggcattaaaacagcgtcataactaattatatccatatcgacggaaacaaatactccttttgtaggtttaaaaatttcgtcaatattataatttttatgtaacattaatagaaaattaaaatcatccgtcttccttataaaactacctgtcaaggtatcaaaaaaatgcaaataacataaaccacgaacccaagactttaataaaaaattcaaatcatttgtatttaatatttttaaattataacgacttaaattattaattctttctataggttcttccatatcgaaaaaatagtcactagagatttttttcaagtcttcaaaaaatattgcatatcctaatctatctactgagaaataatttataaacatattaataaattttacatgttgcttttctaaccacaaatagtaacttagtatatcgtcatttttgcattttataacatcagaaatgtcattccaaaccttgtctgagaagttataatcaggttcaaatctagatatattataaaaattaaacactgctaatctcctactctttctaaatgaatattataactacccaatctttcaccagccttactactgcccctagatgctatatttattgctgatctttcatcgtttactcccttaaaaacatccccactatggcttgtatttgaacgtataaggtatttagggtttccttttttgttataaaataacttaaccccaccaattgttttactttcatatccaaatttagaagcaattttttccaaatcactaaacgagtaaggatttgtatttaaacctctttttttaacaatcatatcaattttttcttgacgattgtttaaattcgtacccacaaccaaatcaataatggcttttgcatcatcaaatgttaattgaccgtctgtcaaagtaattaaatcatcaacaagatcaaaaccttcttttcttaacacatctttaaggtctttaattgtaaccttgctattctttacagcaactttgacgagctttcctgccatttttacagtctgaacaacagctcttaagctattattctccaccgcctccgctgccacaccagcagccacattgacatcttcaccagcaaaggcagcggtgatgcctgcaatcagtttggcagcatttaggatatgggtgtttgtgtattaggctttaaaaggttttcaagcgtactgtttcatcatttcaataacagggatataatctttgtcatgactccaaaacaactctaataattgtaacacttcataatgaccattataaaaatgaacattgccaccttttttgagcatcagttcaagtacatctaatcgctttggtatcatacctatcattgccaagggtatgacattgtctctattaggaatattagggtcagcccctgcctccagcaaggcgatagcagcatcagcattttgtgaccgcccgtgctattttattatataatcaaaacgatctacccagccaaaactctcatcttgctccttaactctttgtaagacattaatgatttggtagaatgtgacgcgcccatgaatttttttgaattttcagagttattccaaataatacaaactggtctttccaccccccaggaaagcaaatcccaaagagcattaagattatgcccataaaattctgttacatcacattgaattgctaaggttctatgaaaatctttttcagttttaacaatattaccatcaatcataatttgattcatttccatctccctataaaagttacagattgataatggtctgttataatgtataacaaaccatcgtttgaatacaagagtcttgtacctggttgttttgatctggatgtggtatttttaagaccaacatccgcctcataccagctgccacatccacatcaaagtcatacagtagggcgatcgcacctgcggtaaggcgagcggtgtttaatactttattgtagtcatctgagcctggttttatctcatcagattcaaatcgctgtcttaactctcctgttactaaccaattcccaaccatctcaccgatgatagcaccaacggcggcggactcgcaagaatggtctttggctttggcggcgacacaacctgtaagtctgcggcaagtttgtgggaggactactattctatttaagaaaccatcaaattcaaagattgcgataaaaaagctgggttacgctatcgctaacctgagcttacgagctggcatgaaatgagcagcttttagttgggctctagcacaaaacccaacaaattcaatgggctgtaccataaatattgggtttcgcattcattcaatacaacctaccgtgctattttattatataatcaaaacgatctacccagccaaaactctcatcttgctccttaactctttgtaagacattaatgatttggtagaatgctgacgcgcccatgaatttttttgaattttcagagttattccaaataatacaaactggtctttccaccccccaggaaagcaaatcccaaagagcattaagattatgcccataaaattctgttacatcacattgaattgctaaggttctatgaaaatctttttcagttttaacaatattaccatcaatcataatttgattcatttccatctccctataaaagttacagattgataatggtctgttgtaatgtataacaaaccatcgtttgaatacaagagtcttgtacctggttgttttgatctggatatggtatttttaagaccaacatccgcctcataccagattctcctaggtgcattaggtacaacactgggagtatcccaaaaaatatctcctccaatttgcttacctgggtttgtgctatttaaagcctttcctgcttgccatccatttttccccgcctcaatttttgtaatgtaatgactaggcaaccttccatttgaacgcaagctctcaataagagagtttgctgcttcagtagttctaagatccaaatttagcctcatgccattataagagctagtggcatacccatttacatggctaatagtgccagataaacttagttgattggtggagactgctttcttgccaatcggcacaaacattaaagttccagccacaacctgaaaagagcctcgtcctgtttttccctgtttaacactctgaatgccgcttgctatcatggtgctacctgtggcaatgcgaacaacattcattacctttccaggagctgcaaatacagcatcgccacccaaagatgcaatatcactaacctgcttgtttatattgcgttgtgttgcagcatcccaaaatattttttcatgttcatcacctgtacccctattaaacagatagtcatttggctttaaggtggagccggtatgatttgtgagcatggactgaatatgtgataagctgttaccgcctgcataatagtagtttagtatgtctcctagtgccatcagttcgctatagcttagtaatgatggattttgtctgtatttatctattaactgatttccaacttggtctaaaataactaaattggttaattcttcagcctcagctaaagtcattttgtattgtccgagaatatttttgcctcgaccctgaattttttcgtagagattgtaaagtttgttgaagtcttgttgggctaaagcattattttgaaccgcctctgctgccacaccagtagccacattgacatcttcaccagcaaaggcagcggtgatgcctgcaatcagtttggcttggcttatgagtttgtctttttgtgcttgggttagggtgtttgggtcatctacttgataatcaccccacatctcaccaacgacagcaccgatgctgtctgcttcacaacgatttcctgctgctttggcagatagacagcctgttaaacctgcggtaagtttatgagatatattatcatttatagtgtcactgtcagttgcatattaaaatattatcatataataattcaatttataaaatggagtaccgcagcattcgtatccagacaaaacaaatcttatattactcatatctcctattgcaatttttggctcagaatcactgtgtacaataaatctcccattatcgtcttcttcaaaataaggaatatattctggataaaactccatataagagctatttttcatctgtaatctactataaattcttttatcataaaccttaacaaccaaatcccttccttttattgtctcaacaaatgtcaaacaatttttatcattacaataataataactttcataagaaagtaacacaatgcttatataggcaataacagcaaagctgcataatacaaataactttattataaagtatatgtttttcattatcttatatctcagttgttaaaattaatgctatttcttataggttaagtttcttgctccatttttaattttaaaatcgtaaccatatttacttcttagatattgataatcaatttcaccatacctaggatgtgtaccataagtatacccagttgtcttgtgtcttataagacccagtatgccgccagcatgtaaagagccactggctttttgaaaatcatcataaggtatatccaatatagcacttgcggtaatcttgacagtatttagaagtttgttgtactcatctgagcctagttttatctcacctgattcaatgctttgtttgagtttttctgtaactaaccaatccccaaccatctcaccgatggcagcaccaatgctgcctgcttcacagtcttgtttttggcggtggcataatctacacatcaccatttagatggctaatcttggtgatgatatacaagggtgaaccagtccatcttacagagtttgacaaaggcagaggtgatacatacattcagtaaagacaacctgacttttttgctgcttgatttgcttgttctattttaaacaaatcttttatgttaatatgcaaatttccaatctttatattttttaaggatatataggagtgatagtcctctatattattaaatgccagtagatttccagtattgtctaaaatcgcatacataatatcatttggaaagtactcaaacatactaccttgtggttcatcgcatatttttccttcggtataaattatcaagtgaatattgttatactctgtacggtttatgattgctccaattactttttcattttttagcgataggtactcaaaaaatgtattatccatctcaatggcataataatcaccattaagccgagtctctcctaaaaaaagatttgtttatacgaataaacaattattgtaaaaattaatgggaataatataaaaaatcctatatattttctcattgtaagcccttaagattttttattttattttatttttatcaaaattaccattgaatttaatttgatatcctgtacacccactcgttgctgcgcaccttggagaacctacaaccgtctcaatgtttctagggattgctagaatacctgaattatgcatttcaaaatcataggtaccattaaaaacaccataggttccatcggttcttcttactaatgtcaggcttcctgtgaccgcccatacattataagtggttggtctgacaataattgtttgtcggccatcaggtagggttttccacaaatctccagttatttttaattcacctaaatcattaacatcaacttgaacttccaaatctttgctggtatttaattggtataagaggtcggcttgccttttgcttcttagaaatctccatccagcatttctattactaataatatctttagtcatctcatttgctttattctgatccgcttcgatcgctttacccttattaatgtaaacagcattattctccaccgccttaccgctgtatccacatcaaagtcatacagtagggcgatagcactgcggtaaggcgagcggtgtttagggtgtgggtgttgttatcagctgctaaaaattttgagcatattttttcattaaattatagatatcaaacacccattgctcttcattttctgttggcaaccaactttccaaaatggttctattagagccatcgcccataatgttatgaacattaccaccttttttgagcattaattctaatacatccaacctatctttggtatagccaaccatggataaaggtctcaatccatctttattaggaatattagggtcagcccctgcctccagcaaggcgatagcagcatcagcattctttgaacgcatggcatagtgtaatggggtcataccataaacatcttgggcgttgataggaatgccttggttgataagatagctgatggtgacaggtggtggctcatcaggattcatagaatccgtgactttgtgaagccaattttttttatcgctattgacagcgagtaagttgtgttgtgggtgttgttttaataaattttcagcaagagtaatattgcctaaacataatgcatctaaaatttccacaccgctcatatcataactcattatttaatacctcttttgcgtttaaattgatttatatgtctaatgatttcacccaaatcatcactgtcaggtttctcattgcgatgacccatattatccgatgcgttttcaagtctgaaataatcaggacgagaattaataaagtcattaaattgagtttgggttagacctgtttgctcagctgctaaaaattttgagcatattttttcattaaattatagatatcaaacacccattgctcttcattttctgttggcaaccaactttccaaaatggttctattagagccatcgcccataatgttatgaacattaccaccttttttgagcattaattctaatacatccaacctatctttggtatagccaaccatggataaaggtctcaatccatctttattaggaatattagggtcagcccctgcctccagcaaggcgatagcagcatcagcattctttgaacgcatggcatagtgtaatggggtcataccataaacatcttgggcattgataggaatgccttggttgatgaggtatttcactgataagccagtcttgtaactatcagaactaggacttagtaaaatttgatgaagccagttccattttgagctttctgaaatatcaaaaatacaatgattttctttgaatttatcaaataaaattaaagcatcttcaatcataccctttttcaagaacgataaaatttcagcaccctgaaattcaatatctttatcataactcattatttaatacctcttttgcgtttaaattcattgatatcattgatgatgtcttgtaaatcaccattgccaggtttctcattgcgatgacccatattatccgatgcgttttcaagtctgaaataatcaggacgagaattaataaagtcattaaattgagtttgggttagacctgtttgctcagctgccagaacaagccgtctgtgttcacgtccataggtatggccgtattgaacaggtgttcttaccactgtaccgtctctgtgtacataatcaccatttggtagtctaatgtaattagcatcaacttgccttcttaattcagctcttaagtttgggcggattagattggttgataccctaggattatttgggtcagaagtaaactgtccacggttattgtgcaacctaccatttttgtctatagtgtagccagctatatttgcttgaccacttcgtatctgtctttgtgcttgaacacctgagattggttggctgacgacaggggtgcctgccttgccttgattttgttttaaaacatccacaccctcttgaatggcacttttcatgcccttcacatcattggcggatttggcagtatcataagctttttttgctttatgagctttttgagctacatcccccaaaccaggtataagacctatggttgcaaaaacataatcgccagcagttttggcctcaacaaatccttggatatcaccgacaacaggaataaagctagtaccgattaagatgtactgcttgttacgactgatggcttcatgcaactcaagaccataagagccgtcagtattatttacgatttcatcccattcattgggatacatctctgcaaaagtattattctccaccgcctccgctgccacaccagcagccacattgacatcttcaccagcaaaggcagcggtgatgcctgcaatcagtttggcttgattgatgagtttgtctttttgtgcttgggttagggtgtttgggtcatctacatccgttttgccaccattgatactaaagctttggggtttgccatcaaagccaacatcggcactaaatcctgcttgtttttgatcatgagtgtattgataagtgtcttgacggcttttaacaatcaaatcaccgccaacagtgacttgggtgttagggaattgatttaactgccataataactaccatcatcttgacgccataggacagctggagcaatatcataaaaatagttattaacacaagaatccagcccatctgtcgcatctttaggaaaattatctctaagataggcaacaatttcatctgatgagacatcccaaatatcatatccttcataccaaataccattaggtggtataaatttgattaagtctgcgtctaaggcttctttagtaagcataaagaataaagccttttgttcttcaaatgtgatatttggtaaagatgctggaatattttcaaataacgcagaaaaccataagttttttgcatcatgatacatctcttgcttaagttcacttgaaatttcaatcattacattcttaccttcttagaaatttaatctcagcttttttattgtggacaactcccgcaggtatatcaatcgtccaaacaagacctgttttgtcttggctttttgcaatacttcgtaaattatagttaccatgttcagtttgtacataatatcttacccctttatcattgccaatagttatttctcttggttgaggcaaaggcttacccgtcaactctgtaaaatactgtttgacctcagcatcgctcgcacccctaaatactcttacaagtccttggctgtttgactctggtagtagcgtacggtttccaattcttactcctactcttgggtttgtcgctgtaaataattctcgtagctcttgatctcttggtatatatactgcagccctgtgagagggtttgctttgattatttgttggtttttcaatgactgcttccgagacagtcctagctccacgcttggtaacaactttaaccgatgtttcaagtctgcgattgggaataatttcaatcgcaacatcaatataaccttgtctaatttcttgttgtgttgcatatctttgtcccgagcgaggttggcatgattcacctgaatatctgaaacatacaataaaatcccctcgagtgtttttcagataaacaacattttccaacaactcagcgagatcatctgaaatattcgtaatggcttgtaattgctcctttacataagtgccatctatatcattttttatttcctcaagctcattataataaaaaatttgagctgtaccattccacctcaccgcctccgctgccacattagcagccacattgacatcttcaccagcaaagacagcggtgatgcctgcaatcagtttggcttgattgatgagtttgtctttttgtgcttgggttagggtgtttgggtcatctacttgataatcaccccacatctcaccaacgacagcaccaatgctgcctgcttcacaacgatttcctgccgctttggcagatagacagtagcataaggtggattcagttcatcctgcaatgcttagcctttattcagccaaagttattttgacatcaaagtcttgcttgtcttatgattgtattgacaaatatcactactatctttccattatcgtgtttcattttagcttgcatttttaaaatttgtaccaaatatcattttatacatttattatttaattctgttaaccattttttatccctgtcatgaatctggcttattttcttatacatgtgttcatatttaatagtatcaatatctttttcaatgatattctcttttagatttattcttgataaaatcagtttgtcatcaaggtaacaccagccgctcgctccagatccacctgatatatatgtatagtataaataaccatcgtcgacagtgtagtcattaacaaaatcttctgccatgtagtaattgtttctatcgtacccgcttaaaacatagttaaaaacaggtatctgactagcagattttgtgatagtgtagttgccaatttttctatctgcaaattcatagaaaacaatcagtgcaagaaatatcgatatgattacataaataatttttaacttcatgttacttcctcagaataacctttccgactggtataattttaaatttcttgccattgccagggcgacctaatatcgttgctatatttctaataggatattcacgccatgattttatatcaaaatcatattcatctggtacaatacggtattcttcagtaccaataggtcgacttaaagttacatttcctaaaactgcccattctgcattccttaccattgttgtagcagagtgtgtttcttctcctggcacgcttttattatttttccatgattcattcgctctggttaacttaacacgaattggttctttaaatttcacatgtagaaccagattttcatcagtattgataagaaataaataatctgcgacatttttcttaaatggaatttcaccactttctattttgctaaccaacagcttgtcattatcgctaaattctcttctaagactagcaatgctacgcactttattcttataagtcgcattccacctcaccgcctctgccgccacaccagcagccacattgacatcttcaccagcaaaggcagcggtgatgcctgcaatcagtttggcttgattgatgacagcttctttttgcttatcggttaatgtgtttggatcatctacatccgttttgccaccattgatactaaagctttggggtttgccatcaaagccaacatcggcactaaatcctgcttgtttttgatcatgagtgtattgataagtgtcttgacggcttttaacaatcaaatcaccgccaacagtaccagttaggtgcttggtatttaaattagcaccatctagggtaagactgtactactccttatggctatttggactcattttatcaattgaccaatttgttttaaatctgaaatcgtgggtatggttaatgcctcactgggcgtatatttatctccattcaaatcttgcaaaaaagagcaagatctacattcatacagaagatctttttccttaactactattaagccactcgttttgcaattggcacaaataaagtttgtctctaaaaagaataaactctccaagcaatccctaagtatcattgctaatgtttctgtgtttgctctaaattttatgcaattttctagactgcgtacaatatccatatgattagcataagaaatagggtaattcaaaacatttaaatctttatattgtaaaataccataaactttatcaaaaatagtgcccactaactcaacttcattatcattaatccatttcaataactcatcggcaataatttgattacaggcattattctgaattaacctctctatacactgtataaaattattaattagtgatttttttaccaatttataagtttgatattttttcattgtgtaccaccctttataggatatacggtaataagatttccttttacatctgttaaaattttgatgtatgtcgtatcacctcccccctgattaagactggctttacccacaatccgaccagtattaaccactctttcaaattgacctccatctaactgcctaacaggacttgaaattgtatgtttgtcagataaaatcctctttagcttatcaggtgttatgctaaatacagacctattatttgccaaagggctattaaaatgaccctcaagaacatgatcaaaacctgctgagacaggatgaccattgcttcttaaaggtgtataagcggtacgtccattagcaatattaattctactagcaacagatctaccagaaactacttcagctcttccttctgcctttaaaacatccacaccctcttgaatggcacttttcatgcccttcacatcattggcggatttggcagtatcataggctttttttgctttatgagctttttgagctacatcccccaaaccaggtataagacctatggttgcaaaaacataatcgccagcagttttggcctcaacaaatccttggatatcaccgacaacaggaataaagctagtaccgattaagatgtactgcttgttacgactgatggcttcatgcaactcaagaccataagagccgtcagtattatttacgatttcaacccattcattgggatatatctctgcaaaagtattattctccaccgcctccgctgccacaccagcagccacattgacatcttcaccagcaaaggcagcggtgatgcctgcaatcagtttggcttgattgatgagtttgtctttttgtgcttgggttagggtgtttgagtcatctacttgataatcaccccacatctcaccaacgacagcaccaatgctgcctgcttcacaacgatttcctgccgctttggcagatagacagcctgttaaacctgcggcaagtttatgaatggcaccaatggtgtctgcattgcaacataaatcatattataaataatttatttaataataccatttcctttattttttcaaaatgagtattctcaacaaaataaaaatgatgcgttaagtcgtatccaatttcaaccattaatttcagatttgaaaaaaccaaagtacacaaaggtcgttcttttaaaccattaatgacatttcttacatataaatctttattttttgttttaataattgatgaattattgtctatatatacaaaatcatcatttaaatcaaataaaaaatcatataaacgcagaaaattattcataactttgttaagttctgctattaagttatcactagataatttcgtgatgtttgaatagcatacaaacttttcatttatatattcttcctcgcttaaaatatgatcaaagtatgaaattgaaaaatatgttttgatatttttaggtggtgttttttgtaaatctatatacaaatcacctaagttatctctagttaaagttgctttcaaactatccaaaatcttttcattgttaaaatcaaaataaatcatcatttaatctcgcaaaaatataccatctttagaaattgtccccactcttctacctttggaatttattaatttccatgcactgcctgcatggggagaatttcccctatctggcgatattttccattgtgtattaggatctatatagtccgctctagccccactattgctgcttgtcgagcatccgcccatgttaagcgattatttttcttgtatatatttcttagcttattaccgatttttaaagagcttacaacagcttttaagccattattctcaaccgccactaaagcttcatttaccgctgtatccacatcaaagtcatacagtagggcgatagcacctgcggtaatcttgacagtatttagaagtttgttgtactcatctgagcctagttttatctcacctgattcaatgctttgtttgagtttttctgtaactaaccaatccccaaccatctcaccgatgatggcacttatatatcctgatagataaataaatatgtttctttttcttgagtgaggcttgaataactggaaatatacaagtaggaatatatgtatattacataattatttgattcatcataataggcgtaatagcaataaccccaaccatctagcatagtctcatgtatattgcaaaaactttctctgtggttgtttccatctaacagtataccgatattatttattgattttgggtatgtgccataactggtattgtaatcatctatcttatttataagatattgaagtctttcttttgacatttttttgtcttttaatacaaacatatatgatgcaaataaaagcaaacaaaatatgaaataatagaaatattttttattcatggtataaacattgggttaatagttctgttaaaaatgccagaatgttttttgttgtcaatatctggtaaatcattgtagtttggtgcatgatatggggacttaacatctaattcttgtttaaaataattataaatttgttgaccaaaacttatttttgattttgggtcaaaatgatttgcaccaaataccgccccatagtaatcggagggtagatcttcatatgaatacgcagaatgaggggcttttatactatcgagtttttcctgtaaataaccacgcttcaccgcatggtttatagatttactaactatttcttgttgcgtaagacctaaataggaggtggaaggattttccatcatttcctttttatagctatatgcctcacttgcataaaataagaaatgaaccatatcaatccaaccgctttttttgtaaggagagatgatacatacagggttgtttcaccacactcaatttagtaaatacaacctgacttttttgctgcttgatttgcttgttctattttaaacaaatcttttatgttaatatgcaaatttccaatctttatattttttaaggatatataggagtgatagtcctctatattattaaatgccagtagatttccagtattgtctaaaatcgcatacataatatcatttggaaagtactcaaacatactaccttgtggttcatcgcatatttttccttcggtataaattatcaagtgaatattgttatactctgtacggtttatgattgctccaattactttttcattttttagcgataggtactcaaaaaatgtattatccatctcaatggcataataatcaccattaagccgagtctctcctaaaaaaagatttgtttatacgaataaacaattattgtaaaaattaatgggaataatataaaaaatcctatatattttctcatttatcatctgctttgtaacggcttttattatctatgtcggttatgatgagtgtgccagcccctaggttgagtaaagcgataacaatacccaacagatttaaggatgaggcttagatgttgggttttcgtacaagagtccaacctacgcggctaagctatatatggcaacagtaactgcgaccaaatacaatccagatattaaagcacaatatgaacgcttacagcaaaatggcaaatgtaagatacaggctttaccaaagtcaggttggtttagcttaatcttaaatttgctgaaatttgatttgactttggtttgcagagatggtatttatgcattgacatggttttggctttatcaaaaaaataaatacaagtatcttagatctctatatttaatttcattactatcataagatgatacatgaaaatccacattatttaaaacccctttatatttcactggttcggtaaaattttccacaattatctttccattatttttctttctttttatatatatgtatgtttcaagaggatattcagcataaggaacaattaaatatgcattcctactaattataataccgtcataaactctaaaaaaagtatccctaccttgatggtgttgtattattgttatgcaaatttcatcacagtaataataagctgtttcttttgctagaaataagtatgccaaaaatattgatatggatattaaaaaaacaaccttaaaataaaaactcaatatataattaaaaatcgccatttagttaaaaaaccttataattgtttactttttgcattctaaggagtttgagttattaatgttgcactcttttaattgatatgattagtccagcagaaatactatctcttattatctcacaagtctcatctgagacctttttgagcaatttgcctgatttagtggcatcattattattctccaccgcctcccttgccagtctcgctcccgctcaccacatcggctacattgccatcagttgctgtgtaagttgtggctactgtggcaatgttaatgatattagcaatggtttctttttggtcttgggtgagattttctggatctttggtattaaataagaaaccagataaggcaggacgatcgcttcactggttgctcctgattttaacggcaaaataaacaattagttgttcaaaataaaagatacatacaaattctcttcatttaatttgtttaaatatatatttgccatttcaatactctctgaaaaattataaccctcatagtaccaattatcataagtggcgacaaattgaccatcttgaagtttctcgtatatatcaccgcctaatattaaaattttttcatcattacacaaaacaaaaaaatcttgaattaactctagcggcattacgaattcatttatacctttactttctaagttgctaccaacttttatgtaaaaatctaatattttcttattcactttacagctaccctcaattttcgtttggaacaaacaatctatggtttatattaccatttggctctctgctatattcaaaaataccttttttgcctctatagcttccaggtatttctaatttgtctcttacaaccccatcttttccagtgatttttgacacagttccgtgtttagcaaacccatccactgattgtggaaatgagtgataatcacctgaagaagcttgtatttttactttctgtgtgtatttagctccatcaaaaaagttttctgctttaataacgttttttgttgtctctgtcgctctttctactttaataactgcagatgcaccagcaggcagaaaaggtaatgctgtagcaataccatcatatattaaccccacaccatcaattgttgcagagccataatttccttctgaaatattatatccaaatgaagctgctcccaccccaatatttgcaatatcccatacagtttcaacagcattattctccaccgcctccgctgccacattagcagccacattgacatcttcaccagcaaagacagcggtgatgcctgcaatcagtttggcttgattgatgagtttgtctttttgtgcttgggttagggtgtttgggtcatctacttgataatcaccccacatctcaccaacgacagcaccgatgctgcctgcttcacaggcgttatcagtggcttgtgctgatagacagcctgttaaacctgcggcaagtttatgagcgatgttgcgtgctagtgtatcaccatcgatgtcatggatgatgtctttgaagatgttttgagtgcctagaccgacaagctctttggttaagctttgttttaaagcctcttccaaatccaccccatatactgcactttctagcagtccacgactggtaccatcggcaatgcctttgatcagtctgtcattaaagcctgcttgggtgatgtcggtgtttgatagtcctaggcttttgttaattttgctaccaatcccagcgctggcaatggcaaaggtcatttgcttgatgttttgtttactacctaagtctttgagtgtttgcttgatgttgccttggttatcgattaggctgatgctggcttgtgttaccaatgagttaaaggcagcacttgtcatggtgcctagggtggtactgcctgttgctgttgcaacagtacttgtcagagctgtacctacgccacctgtcgcataagccaccgcaatcgccacaatcgcagcaccagcaggggtcagtccttgctgcttataatcccaatctttgtcggttaggatgatttgctgccaatcaacatcattgcgattcaccagatcgtttagatagctgtactgtggttgggtggtacaaactggcttagaactcatatcgttattttagataaatttcaatatcatcctgaaagtcagatattgcaccactataaaaaacatcattatttagattgtttatataggaaattatatcatcatttatataaccatctattcttaccatatgaccacatgcttttatacaggcattttttataaaattattttgacagttttttaaaacatctccaataaaataatgcaatccatctctatctttgcaagataaagatgcagcaataataccttcaattgcttttttagccttattcgtttctatgtatttttttaactcattaaaatcgacttcttgaggtgtttgataaatattactcattttattttaccctttttatttgataatccattattaatcagtacatttttcatttcctgagttagctcatcccaagttctaacatgaccatgatatatattatcaatggttttatcaaaaataacaaactctcccgtactcttatctacagctattcttctatcggaagtatctttgatttttatagacacatccagcatttgctgagggttagttggagcctttgactttactgcattaccaacatttccatgataaggtgccgcttcatattttaaatcacaacaatccgcattatgcacccacaccccatattcaccaatatgataggtgtggaactcttgtacttcaaagttgtagtttaaaaactattttatattagtagacatccattctatacaattatttaaaatttctaaaaattcatctttttttaaatcaatagaatcggcaatgtcattaattaaataaataatttttattttgtcatcatatgaaacagcaaatattggttccacatcatcaatcatctctcctatcaagattaaaaaccttaattcttgattgtcatttgatttaaaggataaatcatgcaaacaattatataaatttttattatccatatgaaatatagaaaatgaatccaataatcctttttgtatattttcctttaacaatattaaatctccgtgataaaccccaagagtggatgatttaagaaaaatgccttttggaaaaaattcatttttcaagatatatgcaaatataccttcatcaaagttgtcataagaccaatctgcaatcttgtcagtataaatagcaaaataatcaggattaccaaaaatcattttttacttactcctagttttttctgaacatcgttaggtatttttgcatcatactcacttttcttaactgttccagaccaatgataagcatttgttgcaggggtataactaaattgttgaacgacaccattactatcaatagcaaaccttttattgctatttgggttagatgaagctatggatttgtcaaacaagtcaagagagttgatgggttctaattcagcttcttcaccagatttttttccaccacgaccttttgtgtgttttgggttagattgatatatcaatccattatatgctcggatagggctctcatgtggtatatcagagccttttttgggtgttctatctgtgctaatctttggtatattgtagggtcttgcatcagttttattgtaatctgatgtacgataccattgaccatctttacctttgtagattgcaattgtttgaccattaccatcttttgtattaaagattgattcacctttgggtaatgttttcccatttggtgtgatattcaaatcacaacaatccgcattatgcacccacaccccatattcaccaatatgataggtgtggaagtcttgtacttcaaagttgtagacggtatcggtgtgggttagctttgtttggctgaggattgtaacattaggcagaccatgtttgtcaagtagggtcatgccttgttctagtaaagaagctttaagccagccagtctctttaatccaaaatggggacagcaatcttgattgattatatactatactttttcataaactcaaattcatcttgatagttttccaaaggtgtcatctctaaccattctttgggaatgtaatcgctttcaatttgaatttgatagccatgataccatgccagtttagtataaagcgttgctggagtatctattaaatcttttgtataaccgctttctaaatccatgcgttgtctgcgattaaaagttttggtttctaaaagttgggaaatagcatttatcataccatcaatatccccttgagaaagagataagtaaaaagtgtggtcaattaagtagttcttgccacgacccgatgtcggtggatctgctaacactttctcacaacgctcttgtaaaattttccagtctccacgcaatgcaataaaaaattgtttggtaaaaaattgctctgatttagggttgtccgcagattgactaaaaatatgagctagatttgagtaccattcaatcagtggtttatgattggataatagaaaccacaacccttcaaaagctctgttttcataggcatattcttgacccaaataatcataaggtgattgagacattacatattgtagttttgcatagttataagcataatttttagtttcatttaaattattgtattgaaactggtttaatataatctgtattatgcaatatgattgcagtctgatagaagcccactcgatattatcaacttttaataatttatcattccaaaatccaacatctttggattctatccattctgataaattagatttcacatgctctagtctcactaaagctttttgttgattaaatattttcatattaactccaaattactttttaggcttaactgtaaaaggtgtaaataaaacattaccagtttttttatccacaccaataacaactgtttttaattttcctagtctcatagcttttaaaatggctattttagcttctgaattatttggcaatttttctaggacagcttcaatagctggagtacttaattgaacacctgcgttgctagttcctaatttagttgctccgctattagcaagttgtttggaatctatgatgataactgtgccatctgtatcttgaatgacatggtcaaaacctttattactaccaccatgatattttgcacctgctaactctttataaccactatcttttagaattgaactagtcagtttctctgttttttcgccacctttatcacctttcatgatttcatcaaccattttttgttgttgtggggaaagtttccttttttctactaaaccaccatgagtatccatgagttttccactaattctacctgatggggtcgtacttgcaggtgataaagtttttgttttatcaacaacttgattaacttcacaacaatctgcattatgcacccacaccccatattcaccaatatggtaggtgtgaaaatttatggatttagacttgtagatttatgcttttacattattttcataaacttttaaaaaatcattgagttttttaatatatatataattatcaaaatccttataaatgctggttatatcatcaagaaattgctttgtttttttataaatttcctctaaccatatgttaatattgataggagccatttcattgattattctataattgtctggtagttttttgcttaataactttaatgtaccatcttgattatcacactcaataattgaaatttttaaatattgattattttttgtgaacaaaatatagtttttgatatatgcactatctaagtcataaccaagcataatgtatttattatcgtctctcattagctctatgttaattttattaagattaaaaaaccaatcaaacaaatcatcattaaacttaaatagttcaaataatccatcatcaatcatgcatttatctcttaaataaaactcaaagtcactctcaataataaaaactccataaataattggtttactaagaatgtcatcatagttatccattaaagacttttcatttattctatatttgatacttatcatattcatataaattatcctttttatatcagaaatcgttaatgttatatttataatgaccgtaagccgttgacactttcctatcattagatatatttattgtaattttttctcctcgataaacaaccgtatgatttccacttgttacatttttaccaatagcgtcttgttttgcatattcagtagcttttactattgtgttttgatcccagtttttatgaaaaaatgttctattgcttaggtttaacatattaaacgcatcctgcttgctttttcctgttttattcatgattgtgtcaatttgttgcctaatctcattgtaatcatgccttttaatgatatgatctttaattgatttactcaacggttttgatagattatctattaatttctgatcaaccccacaacaatccgcattatgcacccacaccccaaactcgccaacatggtaggtgtggaagtcttgtacttcaaagttgtagacagtttcggtgtggttgggtaggtattgggagcatcttcaatggattgatgggctttactattggaaatatgacttcaattcattcaaaaattcaacaaatttatttatacttacaatctttatcattggtgtatttaccgttatgtttttataactaaaaaaatgttcttcgtataatttaaagtaaaaataaaaatttcccctatctcttatgcatcttttcataaaatcatcgaatgtttcttctaaggtaaagatattttcattttctaattttccttctctgataatctcacgaaataagtccttgtccattttttcgcaaaaataaatttcttctaccaacaaactttccaatgaatttataaaactaggaatataagttggtgaacttaaagtgccaattttaagcccgtcaataactaaaactaagttagccatattattacaatatgtacttgaaattatttcaatgtaaatttcttgatttcctatttttttatagttttactcattaatcatctaatctaacaaaaatatcatctaagcacaatgattcatcgctaactatgcacagtacagcatttacaatactttctttagtaatttctttaagaataattgatccaatactccaaaagaagctttcttgactgattattttccccacatcatttagacaaaaagcagagcaactatatcctatccctttgtaatatataaagaaatcaaccattccataactatattcagctataaaatcataagactgaatttccaattcattatctctataaagaatttccatattatctgccatataattctttcagtcgagtccaaactttagcttggttacctttaccagaataacccaaaacttcccaaccattagcggtttttctagcatatattctaccaccatttctatgtctaaattctgtaatgccgtgataaacactggtaccgatacctggattttcattacctttcttaatttgttccatcatttgattgataccttgactctcttgctgagacaactttcttgcctctctcagtagtagttcgtcttgttttacaatggaagaaatatggtttccacaacaatctgcattatgcacccacaccccatattcgccaatatgataggtgtggaagtcttgtacttcaaagttgtagacggtatcggtgtggttgggtagtaggtattggcttagagcttaatttcaatgctatttcttatttataaaaacacctttttcatttagaaaaaatattaatttatgaacaatctcaacataatcactaaaatcaataattacagaaaaattattggaatcatccaatgaagaaaaatcaaaaaaatctttcaaattatttttaatataaaatattaattttatcttatcatctaaagacttaataccaaacaaatgaaaactctcagcatgacctttagaaaaactctctaaacttaaatcaaaattaatattttcctcaatatcattccaattatctaaattttcctcccattcatcgttggagttagcacaccagtttggatatctttctaataacataaatttcaaaatttcaatatttgataaattaaaaatatactgattacagggtatattgtctaatttttttaaaatattttcgaagtcattataaagcgatattaatccgtaatttgttaaaaaaaactggctatttatataaattccaacaataccattaatttccttgtcgattaaccaatgcctaacttcatcaacatagatggcaaaattatcggggtttccaaaaatcataatttctttacctttttaggatttagattgaaatgcttaataacatcttgaggtatgttattgccttttaatcgctgatctacagcttgatccttgcctgttctaccagcccaatgccaagtaccatcattggaatttgcaaattgatgaatgtttccatcagaatcaatggaatatcttttatttccagactgaaaagagttttcaaatagctcaaaagagttttttggctcaataccagcattcggacgatttcctgtttgacctaatgtgtgctttgggtttgacttatagatttcattaactttatctgatctcttagccccagcaacaggcagaggagatgttttaacatcaactccacaacaatccgcattatgcacccacaccccatattcgccaatatggtaggtgtggaagtcttgtacttcaaagttgtagacggtgtcggtgtggtctagtttactttgactgacgatggtgatgtttggattgccatgcttatctagcaaggtcatgccttgttctagtaaagaagctttaagccagccaatgccttctacccaaaatgggtgttctttagtggttttaaaggtttctgtggagttattgctgtgtttgacaacaacttcatagatttcttgattgggcgtgaccttagtagcgatgacaggacggtagccatattctgtgccaaactcttgtcttgaccaaattaaatcaccatgttcaatggtttcaatgggttttagaccatggatggtgtgaatgagtgtgcctgcggtgaagcaatagacggtacatgcgtggttgacggtcttggattgcacagcctgtacaaccctcttgccacccgatttaataatcttgtagccatactttccaatattgccagcaatggcttgcataatgtacgattcgcccttttcttttgctagcttatcaacactggttttgccatcagttaaggctttaatgtcttgatagacttgataagcggtatagaccttatcaactacataaataaccactggaatcgccgcccaaatcgcattgttttctacagaggtttctgcagtatttgcagcaatttgtgcatcataccctgaataagcagcgattacagatgcggcaagctggctttgcttaataattgagtttctttgttcgtctgttaaaattagaatggtatcaccatcaatattttggtaatatgacctagatagctgtccagccactacctcaccaacggcagcaccaatcgcccctgattcacagtctttttgtaatgcaccagcagcacatcctgcggcagcatgggcgattttgtgtaatatccagtcggtatcttcaagtcctttaatatgattagcggcttctgattgtaaagctgtcgctaaacctagctttagggcatattctaagttgttaccaagactgccaccttgaatgcctgtttgaaccaaagcggatgccgtgctatcaatgatgcttttaaataatttatcatcaaatccattttgggtatttttacctaaatcttttgcccagtccgtgccgccgattttttctaataagcctgctgtaactgcactggtaacaacgcctttgactgtactgtcatctccaagctctttaaatacggcttttagatttccctgattgttaatgagactgatgctggctttttgactgatgctgattaaagctgcttttcctgctgcccctaatgctgtactgtttgtcgcactcacaatagatgccgaaagttctgacccaagaccacctgtcgcataagccaccgcaatcgccacaatcgcagcaccagcaggggtcagtccttgctgcttataatcccaatctttgtcggttaggatgatttgctgccaatcaacatcattgcgattcaccagatcgtttagatagctgtactgtggttgactggcaagggtgatgatttcatctttgagctgtcttttttgaacatctttttcagatatggggatttggatatttagaccaccttgagcttcaaacatgggggctgctgtacctgtaaagcttggcagttgggctgtctgagtgtgttgaccttcgccttgggtgcgctgccatacgacccaattgtcctctcgttgagtggcggtttgtagctcacttaaggctgccaatagccgaattttgccgccggcactgatctgtgcgcctttgaggtactcaaagcgcgtgccttcaagcagggtatctccttttgagcgactgctgatgaattgcgcagataaggaagctggtacggcagcgatttgactaaagttgtatttgctattactggtaccagtcttaatacctaggaattttttcttggtctggttgttttgttgggtggtgtgagtgtcttttgtagcgtacagattgatattgccactggcgcccagtgtgatgttaccagtagtgttgagttcagcgccatagatgtctagatggtgcttttgaccattattgctgtcattacctgttgtttgtaagcgtaaatcacccgccgttagttcaacaacgtcagcatccacccattcgttggtggtttctgttgtcgtgtacttacgtctataccatctgccgtgcttgcgtgtggttttatcataactatattcaaaatcgataccaacatcaagcagtaggtgatgattggcacgaatgtcaattgcaccattggcttttgcttttgtgccttgcaagaccaaagttggtgtctcatcttgcttgtcagtggctgctttggttgcacgaatgtctatgtctctaccagcggttagcatgcttggtgaaccaaagcttaaaaggcggtggtggtcattgccgtcttgaccgatttcataacggttttggctgcctgttaagatgatggaggccgccttgtcagtttgggtttcggcatcagattggtttgagctgcctgactgcgatgacttggttgtttgctggtaggcaaacggtagcacgccttgcgcctctagggtaatgttaccacttacggcgttaagtaaggcgccttgtgaaagaatgccttgtttggcatacacaccaatgtcaccagcttgtgagactaaggtggttggggtgtgaataaagccagttgagttgctgtttaaaatgcctaactggttttcaattctggatttggtgttggtgaatgcatcggctcttgtggtaagacttagcctggcggcttcatcaagttttgcctccaaggcacgcttttgatcgctcccactttgatttttattgctaaactcacgcttaaccccatccatcactacactaccttgggtggcatagacagtgaggttatttttggactttaggttgacaccttgtagttgcacttcactgccttgcaaagtaagattgccttgatgagcgtttaaggtatagtgcgcttgattgccattggtaacgggattggtgttttgtagggtaagcttgccttgttgactgactaggctaatatctccaccgatggctaaattgtgatttgtgctgtttagggtaagcgcacggtccgtttgaatggataaagaaccgttgagcacttgtgcgtttttgttgctattgagtagtggtgatttggtcgttctggcaatgagcctaccatttaaggtaaggcttgtactgtcaagcaagacagcaccgccttggtaggtgccattaccgttaatacgatgatcacccttgaccacatcgctgacaatgcctttggcaatcaaggtgctgtttgtggtggtttgattgccttgaacatagatggtggtgtgtttggcggagttaatttgactgttgttgacaatcagatcgctgttagcttggatttggatgttggcctgactggtgatattggtatggtcaagtgtttgctggcctttagcaaagcttgagacattgcctgcggcatcaatgatgctttggttgtgtgttaaattaccttgcaagttggcagtggtcaacgccccttgggttgtaaaggttgtgttggtgaagctggccgtaccatttgtgttttttggtgttggattgtcaaagacaattgcctcaatctttttaccagcatgaattgttgtgttgtttgtgccaagctcttgtttggcctgcaatgtgatgttgctggcactgttcaaagaggcatggttggccatgatggtaggtgcactcatggcgatgtctttgctggcccaaatggtggttttattactggttgagccattcaatcccactgcggtgttactttttaggctgaccaccccttgctgtacacttgattggccagagtgggtaattttaccatctgcggtgatggtaatggcttgtttggcatttagactacctgcttgatttaccccaaagcccttatcggtaccaaccaagctaatgctaccagctgtcattccacctagggacttgatgtcaatggcagtcgtgggttttgttgtattggtagtcgtttgattactggtgatgggcgtaacttgtcctacatcactgatctggttggttccggtaacggtggtaatggcatattctgcctgtacttgagcgttaatgttggcggtcttgctgtacagatttaccaagtcggcgtttttgtttggtccaccaagaccaatattattagtcgttgtttgagtggccacattcgcactctttggtgtttggatgacaatggcacccttgttgacagtgtggtgaatatgtccttgcttgttgattgcttgacctgtcgataaggttgcttcatgcacattaataaagccagcaccagtaactgtaatgcctgatggattggcaatcaccaaattggctttttgtccagcaacttcgatggagcctgccaattggcttgccttgctgctacgaacctcattgacaatggtgtgtgcctcaccttgctttaaaaaaggattggcagctactgcaccaaccaattgggtgcctgctcctgtacgagcattatttagaacaataccttgattgggtacatcaaattgtgtgtacttattatgagatattccctgaactggggtttgaatttgaacaagggcaacggtttgctgacggtcgtttttggcggcagcaatgatgggtctttgaaagacaggtgcttgactgtcagaaataacattggcaaatgcagaaccgctacagccaagccaacaagcgatggttaatggcgcaagctttgtcatcaaagagatggaaagccaagttggctttttaccaagaccaccacccaaattgcctgattttccctgtgctttcgttatttcagaaacaacaaccaatcttcctaggttcttattaaaaataacacggtagcaaaagcgattcatggtggactgtccttgttgtttggtatatgcgttaaaataatttggtaagtataaatattttctgatatgatgacaacatctttctataatgttacaaaaatattgcttcctatgtcactcataagtcaaggacaggacaaacccatgcgttttataccttttgctgtaactcttttatcttttactggctcctccatcttttctgtggccaaagctcagattgcaccagacccaaccaaagcaaatctttctgcaataaccgatgatcgtcgtcaggcggctcttgcacatttagcaagacaagatttggcagcaacagatgacgacatgggtgtcgatatcaatcaaaccaatatcaaccagccaaattggcaagatgacaagaatggcgattcatgttttttggttgatgagattgactttgtgattgagggtggagaagataaacatattctaggtatgacgccgagcaatttacgcagcttgctatcgcccctgttggaccggacaaagccaacatatgctcttaatcactgcatcaacaatcacaacctatctttaattgtagatattgcccataatgaattactaaagcgtggttatttaactagcagtattagcattgaagagcaggatttatcaactaaaaaactcactttaacagtccatgctggcaaggtgaaaaaggtgatattggccgatgctagcaaaacgccaacttatgtcaaagccgccattcctcttaagttcaatcaagcctttcgtctgtcatatttagaacaaggtctagataatttaaaacgcatcgatccaacggcaaccgtgcagattataccaagcagctccagtaatgtcgccaatgatattgacattaacaccacaaaccttggttttagtgatttactcattaggatggaccgcagtcaaagcgctgtatttggcattaatattgataacagtttatccaaagattatggcaattatctgatttctgctaatgttcgtgctaacaacctcatgcatcttaacgatgaatggaatctttctgccaactatccattggcgcgcctgattgacgctgcccaaaatgatcttggggttcaggtgggcaaggataggcaggttaattatcacgcttccttgactattccttatggattgtataaattttctgccacacacagccaccaccaataccagcaatttcttgaagggcttcatgcgcccttgacttatcatggcaccagcaagacaagctcaattggattgtctcgtttattgcaccgtgatggcaatcaaaagactgaaggttatataaaggttaatcacaaacgaagcagtaattatattgatgatgttaatcttgaagtgcaaaaccgccgcacaacaggatataacattggcatcactcatcagcatcatcttcaccaaggtggttatttgtatgccaacttggattataagcaaggaacaggggcactaaaagcaaagcctgcacctgaagagcatatttatgatgcttttgggcgacaactacccagtgagggttttgcaaaagcaccaatttggtcactatacaccagtttccaaaagccatttgtgttaaacaacccaaatgatactgaacaagcgcaagataaagcaacagcaaataaacccatttacacatccattcctctcacttatactgctagattacaagcccaatatgccaaacaacttcctgtaccatctgatttattctatttgggtggcagatatagcattaaaggcattaaagagggaaattatttatcaggagaacatggctttagcctatcccaagaacttgcttggcaattgccattacagaatcttaatcagcactttagtacaaatgcaaacagcgcccagttgtatgcaagtattgatcaaggctatgcctatggaaaaaacactcttaataatcaacgccatatcttggctggagcggttggtatgaggtattattttcaaggcagtcaagatccaagaattcaagaaacacaaaatggcttgactcatttcaaagaatcaaatacttatctaaataacacaccaaccacagctcatttggatatattcattggaaaaggaattaagacgcctgaatttatgaagaaagaaaccgtcgtgggtgtgagtgccagcattgagttttaagtcatattattttttgtaatggagtggaagatgactcactttgcattatctaagtgagtcattaaggcttcttcgataatgacgcgcatcggtacgccatggctggctgctgcaactttaagtcgctgtgctaaggaagcatccaaatgagcaatcaccgcctttctttctgccaaagttttttcactgacggccaatgattctgaaaaatcttgatgttgcttgttgtctcgagtaaatttcccttgcattgccatataagtcaccttaataatttaataagtataaaaatattgaaatattaaaaaatattaaaatatttaagtttacaaatatttatctttatatttataaacttataaaagattatattgttaataagctggcaaaaatcttggttaactcaatcttttgcttcgtgtgttttgtgcgaaaaatcggtgctaaatcactaatgctgttcacatacttcacgctgttcgacagtgtagaattaatgacggtcatgccgtaaataccactttgattccatccctagtgaatagatttatattttgacaaacaaacttgtttgatatgcttgcatgataatgtttataattttttgcgaaaaatactttaatgaagtctagaaagtggctttgtcggtggtaagacttggttcaaaaaagtacacaccttggaacttatgatgtaaatttaaacagaattggagattaaaccatgagccaagaaatcattgagcgggaagatcgaaaaaaccatccaaacgcttattgaggagttaaaaagttttaaaaatcaagatttgattgttatggcaacctctgacgagggtaaaaccttcaactcggttaagttggtcagcaagggttttaaagaacaagacgatggcgaagtggtttattgtgctttgcatatttgacagataatacaaaaatccaccgccaagggtggatttttgcttaaggtaagattaagttagaaaaagtgcttcacaatcaaagcaactactgcaaacaagatgatggaacaggcaacccaaggataccatctggcttctctttcaagtgcagccgacttttcttcccattctttttctcgttcttttcgttcttgggctagtttctcataataagcccttttctctcgataataagccacttgttcttgatagtatttctgttgccaatctgcggtgtcatctgtctgagatttgtgggtttcttgctcaaatcgctgtttgcacatttcttcaaatttgcgaaaaagttcgttcactagacgatcgagccggtcggttgtggtagtcatactcaccccctttgttggtgtttgaaaattcttttagccaaaaacttctgaatgggaatttaatcgagccaaatgcaaaatcccatcatcaatcttataaatcaaaactaagtcattggcaacatgacaatcacaccaaccttgccaattgccagttagtgcatggtccttgtatttagcaggcaaagcttcactgcgactaaggcaagccaaaacctctaccaagtttgttgtcagcttaatcttgcgaacatcacgatcaaagttttactaggcttgatttgcaacatcgccatgctccgccaaaaattcatcaagattggcgtatagcgtaccaccaccattgtccagttcacgcattgcagaaatggtcttagcatttggttggtagtcagcttgatagcttaagcttaggggaaatttgcaagttgccaccaattccaagaatagcattttgaccgcttggcttggtgaaatgccataaccgtccagaattacctttgcttggttctttaaatcgtcatcaatgcgaatattcaaattggtcattgtcataatttaggctcgcattgcacataaatttaattacattgtaaaatcattttggggcaaaatcaagaatatatcctagattattaattgatttttttgagaggtcttggcggctgcgacagcttggggggaaaacacaaactttataaactggtgtctatacaaaaacatcaaaaatcaacttactttcataatttaatatttataaacttatatatttatataaaaaaccacgctatcttaaaactatccccatctttctttagccaaatatctgtgttattattcactattatttctgccttattgccaaattcataattcagcaataaaattcaaaggtcttaaaacaacaaggacagtccaccatgaatcgcttttgctaccgtgttatttttaataagaacctaggaagattggttgttgtttctgaaataacgaaagcacagggaaaatcaggcaatttgggtggtggtcttggtaaaaagccaacttggctttccatctctttgatgacaaagcttgcgccattaaccatcgcttgttggcttggctgtagcggttctgcatttgccaatgttatttctgacagtcaagcacctgtctttcaaagacccatcattgctgccgccaaaaaacgccgtca

SEQ ID NO: 34 - DNA, 89047 bp, Moraxella catarrhalis
  unsure 66874: a or g or c or t, unknown, or other
atgctggataatctcttcataccggcgtaaatgaacaggacgcatgatggtttgagggtggtctgatttacgatttttgatgtgtggaggtagcataaatttcctaatgagtttatttttatggcataaagtttgatacaatggtcgccatcgctatttttatattggcataaaataagcatatcaaggtaattgtataaagcaatacttaacaataaccttaaaaatggcatttaaaggattataacacgatggtttttgatgtcaattttgccagggtggataagcttggtttggttgggataatttttttgtaattacttgcttaaattgtatctcaactgattgtaatttttcatatatgttatataatacttcaacaaatgttatagtatatcatatatgaaggttaccatgataaaaaaaccgcttgcctgtgccatattggcaactttttcaatgccaatgctggcagaggcgaatttaaaggataagccaaccgtcattttagatggcgtttcgatcacctctttagctgaccaaaatacagagtttggcgttaatcattcaaaaacagtcagtggcatcacagtttcaaaagagcaactacaacaacgagcaaccaccctaggcgatgccttggcaggtgagcttggcgttcattctaaccattttgggggcggtgcctcagcccccatcattcgtgggcaggagggtaaacgcctgaaaatcctacaaaacggttcagaggttgtggacatgtctgggttgtcgccagaccatgccatagcggtggacaccacactggcaaaacaggtggagattgtgcgaggctctggtgccttgttgtacgcctctggcaactcagcaggcgtggtcaatgtcgttgatgacaaaatacccagcaaattgcccagcaaattacaaggtgatgtgacggtgcgtcttagcagtgccaaccgtgaaaaattaatcaccgccagtgccgaagccccactgggagagcatgtggcagtgcgtgttgcagggctgtccaaacaagcagcagactataaaacgccacgctttgaccgccatgtctttaacaaaaaacatgaagatgataacactcagccagaattcatctataaagacaccttaaagcatctgccagacagccatgccaaatcaaacgcaggaacgcttggcgtgtcatgggttggcaatcaaggctttttgggggcatcggtgagcttacgccgagacaaatatggcctgcccaaccattcacatgaatatgaagaatgtagcgtgcatggcatttctcagtccgccttacaatacaagccatatttgcgtttgtatccttttttgatggaaaatgatgacttagagtttgacaatgcagggcttgaatgccatacacatgatgaccacgaccacgagcacgaccatgctcatgaccacgagcacgaccacgagcacgaccatggcaaaccttggattgatttgaaaatgaagcgttatgatgtgcaagggcaaatcaatgcgccgtttgctggcattgataaaatccgagccagcatgggcaaagtggattatcatcatgatgagatagatgggggtgagaagaccagcttttttgataatcaagccaatgtgtggcgtctggaagcctcacatacccccattcatacgccgatgggcaagtttagcggggtgtttggggtaggttatctcacctcaaaaaacagcggacttgtgccacctcgttatgaagatggcaataaacaagacacccaaaacatcttgcacaataataaaaccaaaacaggcagtgtgttttggtttgaagaatacaaacccaatgacaagctgaccgttgacgccgccgctcgcattgagaaacaaaccatcaccatggattatgataaagacgccatttatcagagcttaaacttaggcttagcaaccgctcatgaaccagacatacgctttaaacgattgctggacagcggtactttaaaccccaaaaaacaaaccgcacgctcttatgctgttgggacgcatttacaattaacgcccaaacataaattatcgctgaatctgtcgcatcaagaacgcctgccaaatgctcaggaattgtatgctcacggcatgcaccttgccaccaactcgtttgaaattggcaaccgctttttaaacaaagaaaaatccaacaacattgatttggggctgacatttcaaggtgataaatgggattatcgtcttgggggctatcattatgattttgataactatgtgtttttacaaacattgtcgcagtataagcaaggtttgcgtggcatgcgtcatgataaagacttaaaaaccgcacgctatgaacaagcagcggcgaaattttatggatttgatgtcaacatcggttatcagattaatgatgtatatcatgtggcgttatttggtgattatattcgtggcaagctcaccaatttgcctgacaaaaagggcagaaccgatgcgtatggcaaccgtcctctcatcaaacagccagacagtcatacgccaagactgccaccaaaacgccttggcatgaaattaaccgccaatgttaatgcaaattggtcagggtttttggaatatcgccatacctttaaacaagataaattggcgaattttgaacgcccaaccccagctcataacttggtgaatttggggcttaactatcagcacaagccaagccatcaagcaggctcggttcaggtattttttaatgctaacaatctattaaacgataaagtctttgctcatgagacatttttcccagacatgccacaaatggggcgaaactttatgctcggggcaaatttcaaattttgacaaatcatttaactaaaggcaatcaatatatgcttgtactaaactattatattgattaaatgtgatattcattaaaaatctgcattcacaattaaggaatttgggtgcagatttttatatggatggttacaggtggataaatactaaaatcataaggccaattcgtgttatgtttaaaaaatatacccaataaagcagtaatttttgttaagatgatacaaacgactctgatagatagtgtcttgatagatagtgtatcgtagcggtcgtgttaactttatatatttagactataggtgccatcatgtccgactttcacacctcccatcagcatcatgagatacttggcagactcattgaaatgcaaaagctgaatgatgatattcaagcgttaacgcaacaacttaaaaatgcactcaagcaaatacaaaagttgcaagataagcatgccaaacttgatgaattttatcaaaaagaatgccaaagtctttgtaccgcttaccaaaatggtagtatcagtgagcaagatttggattatgtgaacaaaaaagcacagaccaaaggttattctattttaagtgaagatggtatttggaatgtattgattgatgctgaacaaactcaagtggcattaattaagcaattggttcggtcgttataaagatagttgtcttgttaaaaaagcggataaatctccgcttttgtcattcttcgtcatcaccataatacttaaccccaatcttaatgggttctcgtccttggctgcggcgaaaattattggtatcacgcagtgagtaagcacagccacaatattcttgttgataaaaatgctctcgtttgctaatctcaatcatgcgattactgccaccgcctttacgccagttaaaatcccaatattcaaggtcgtcataaggggcagcggcacgatgaccacaatcattaatctgagccatgttcttccatcgtgagatgcccaaagaactggttatcacaggaaaaccatgctcgtgggcgtatagagcagtgcgctcaaatcgcatgtcaaaacacatggtacatcgtctgcctcgctcagggtcttgctccatgcctttggcacgggcaaaccagttgtccatgtcataatcagcatcaatgaatggtatgccatgcttttgggcaaaagcgatgttttcgtttttgcgaatttcgtattcttttttggggtgaatgttggggttataaaaataaatggtaaattcaatgccactggcaatcatcgcctccatgacctcacctgaacaaggggcacagcatgaatgtagcagtacttttttatgtccgttgggtggggttaaaatagggcggtcaatgggggtgagtgttggataatcaaaagctttggcaattgccacaggtgtgtctgttttcatgtcaatagtactcattaatgtatgtgattggttttgtttggttttttagcgattataaatttggctttttatttagcattattgatctattatgctggttttttaccgattaagcaagattttatcattttatcttgtcttgtgtgttgatttataagacattttatgaaatatttgtaagacagttacttgagctaaaaaaatatcaacaatattttacaattgctaatgttgtgttatactagcgttctttgttttattgggtaaataatttatccataaaattgctttatccgtaaacttgaggcaaaacgcatagcaaactgctaagttgatgtcaaggaagaatatgagaaagtatattttaagccgtattttcagatcattactctctgtagttgtcgtgacggctttggtttatgtcattgtttataccttagtgccaacgagtcttatttttaaacaagaccccaactacaataagatgaccaaaactttggataagaaagttgattatgaaaatacaacttttgattccatgggatatattgactatttatctgctggggagctgcaaaagcgtgttagtagccaaggcggcgatattaatagtgaagctgcctaccaaaattatctgtcaaccttaaatggtcagtggcagttaaaaacctatccactgagcgaacagttttatgccacgcgtgatatccctatctatgagcgggtgtggtcttttttctctaatctgatagaaattgatcatccttggaagatacaagatccagacaatcccaatttaccaagatatatgcggtttgaaaaagatgctgcagcaggttgggcgttggttggttctggtactcaccataaatatttgctatataccaatcgtgaatttccttacctacaccaaaatttcattaatctgaatttgggaacttcttacccaacttacagcaatgtccctgtatggcaggtgattacacaaggacaaggtcgtatcgatttacaggaagtgactttcccaacaggtgtgaccaaaaagtcatctgtagatatttatagcagaacctataaaaatccgaataccatggatgatattgcccgtgctaattatggcgaaaatgacaactattccaaaactaaaaccaattataaagatccatctatgatttataattcatttgttattgggttgtttggcgtattattctcttatggaataggcttgcccattggtatgcttatggcacgctttaaagatggattgtttgataaagtttccacggcaaccatgacttttatgctggcattaccaagtattgcgttaatttatgtcatccgttttgctggtagtcaactgacaggtttgcctgactctttcccaatcttaggtgcctcggatattcggtcttatattttgccagcactaattttggggatatttagcttaccatatactgtaatttggtttcgtcgttatttggttgatattcaagccagtgattgggtgcgttttgctcgtgccaagggattatctgaatcagaaatttacaaaaagcacttatttaaaaacgccatggtgcctgtggttgttggtattcctgccagtattattttagccattggtggtgcaacactaaccgagaccatttttgcgtttcctggcatgggtaaaatgctcattgactcgattaaggcagccaataatgccatgattgttggactgacatttatttttactgttttatcaattatctcgctactattgggagatatcgccatggcattggtggacccacgcatcaaactatctgaagacaaaaaaggtgagtaaatggaagttgttgataaatctaagtttaaatttgttggtcgtgatagccgtgcttctgaggttatcgatacaccgacctattcttattggaaatcggttgctcgccagtttttttccaaaaaatcaacctatgtgatgctcgccattttgtcagtgattttattgatgagctttatttatcccatggttgtgccttatgattttagtgatgtcagtaatattaatgacttttctaagcgctatatttggccaaatagtgaatattggtttggcactgacaaaaatggtcattcattatttgatggcgtatggtatggggcacgaaattccatcctaatttcggtgattgcaacctttattaatatcactattggcgttgttgtaggtgcgctgtggggcgtgtcaaagtctattgataaaatcatgctggagatttacaacatcatctccaatgtaccctcaatgctgattatcattgtgttgacctatgcattaggagcgggattttggaagctaattttagcattttgtatcacagggtggattggtgttgcttttaccattcgggttcaaatcatgcgttttcgtgatttggaatataatttggcaagccgaacattgggtacacctaaatataaaattgctgtcaaaaatttattgccacaaatattatcaattattatgacattgttgtcacaaatgttgccagtttatatctcctatgaagcatttttatccttctttggtattggtctaccaactaccacgccaagtttggggcgtttgattgccaattattcgagcaacttaaccaccaatgcttatctattttggataccactgacggtattggtattggtatcattgccattgtatcttgtggggcaaaatttggcagatgccaccgatccacgctcacataaatagatgaactgatgagatatcagacaagtaaggactgtcatgactacaaataatgttatattggaagtaaatgatttggtggttgagtttacagtgcgtaaacgcattttaactgccattcgcaatatttctttgaagttacatgaaggtgaaattttggctttagtgggtgagtcaggatctggcaaatccgtcttaaccaagacttttacaggcatgttggaaaataatggtcgcattgcctcaggtgatattttataccgtggacaagatttaaccaaacttaccaataatgaagattggcttaaaattcgtggttcaaaaattgcgaccatctttcaagaccccatgaccagtttaagcccaattaaaacgattggtgcacagattgtagaggtaattaccaaacaccaaaaagttagtcgtaaagaagccaaaattcaagcgattgactatatgcgtaaggttggtatttccaatcctgaaaaacgctttaatgattatccgtttgaatattcaggcggtatgcgccaacgcatcgttattgcgattgctttggcgtgtcgtcctgatattttggtatgtgatgagccaaccaccgctcttgatgttaccattcaagcacaaatcattgatctgctaaaaagcctacagcaggaatatcgctttaccatcatctttattacgcatgatttgggtgtggtggctagtattgctgataaggttgcggttatgtatgcaggtgagattgttgaatttgcatcagtcaatgagatattttacaatccacaacatccttatacatggagcttattatcaagtctgccacagcttgttaatgattcaggagagctgtacgccattcctggtacgccgccatccttgtactcgcctattgtgggcgatgcctttgctttgcgttcagaatatgccatggaaattgactttgaacaacgaccgcccatcatcaatgtctctgatacccattgggcaaaaacatggcttttgcatcccgatgcacccaaggccaacaagcctgaagcgatctgtgatttgcatgaaaaaatattgcaaaaactatcttaatcagttaggatttttaagttaattgatgataactttaagtaataataagagggaataatgtcacagacagtaaataccaccacacaacaaaccgcaccaaaaaaattggtggaagtgaaagatttggaaatctcttttggtgaaggtaaaaaacgcttcgttgctgttaaaaatgcaaacttcttcatcaataaaggtgaaactttttctttggttggtgaatcaggcagtggtaaaactaccattgggcgtgccattatcggacttaataacattacaggtggtcagattatctatgatggtaaagtcattagtaatcaacctaaagatgcagagctgatttgtaagattcagatgattttccaagaccctgccgccagcctaaatgagcgtgcgacggttaattatatcatctcagaagggttatataattttaaattatataaagatgatgctgatcgcttagcaaaaattaaacaaatgatggcggaagttggtttgttacctgaacatctgacacgctatcctcacgaattttcaggtggtcaacgccagcgtattggtattgccagagcattggttatggatcctgaatttgttatcgctgatgaaccaatttctgcattggatgtctctgtgcgtgcccaagtgttgaacttgctaaaaaaaatgcagcgagaaaaacatttgacttatttgtttattgcacatgatttgtctgtggtgcgttttatttctgataggattgctgttatttataaaggcgtgattgttgaaatcgctgaaactgaagagctgtttaaaaatcctattcatccgtatactaaatcattgttgtctgctgttcccattccagacccgatacttgagcgtaaaaaacaactgattgtatatgatcccacgcagcatgactattctagcgatgagccaggcatggtggaaattaagcctaatcattttgtttgggcgaataaacaagagcttgaacgctatcaacaacacatttcaaaccaaacagtcgtataacccataccaactaaaataaggagaagtagcaaggagggattacttaagataattttattaaataccgtatttgtttgataggcatcatgatggtattgattgaaatatgattttttaagttttagatggttagcataaccttaagggtgtttaagttttattcttaaaaacgccatttcacataacaaacaaaggacccatgttatgaaaaaaacgaagttatttgccacagtaggggcagcagtattatcagcatctattttagctgcatgcagcaataatagcacgacagcatcacaaggtggcggtgatttgaccacctataaatatgtgttttcaggtgacccaaaatctttagactatatcttagccaaccaagctgttactgccgatgttaccactcagatggttgatggtttgctagaaaatgatgaatatggcaaccttgtcccttctttggcgactgattggagcgtttcagaagatggattaacttatacctacaccttgcgtgatggggtattttggtacacttcagatggcgaagaatatgcgcccgttactgcccatgactttgtgacaggtctaaaacatgccgttgacggtaaatctgatgcactttatgtggttgaagattctgtaaaaaacctaaaagcctataaagaaggtaaagtgaattgggaagaggttggcgttaaggctttagatgataaaactgtacaatacacgctaaaccaaccagaatcatattggaattctaaagtgacctatagcgtcctattccctgtgaatgctaagtttttacaatctaaaggtaaagattttggtgctttagatccttcatctattttggtcaatggtgcttactttttaagtgcctatgcatcaaaatctttgatggaatttactaaaaatgataattattgggatgctgacaatgttcatgtacagtctgtcaagctaacctataccgatggctcagatcctggttcgtattatcgtaactttgataaaggcgagtttagcgttgcacgcttatatccaaatgacccaacttaccaagctgccagtgaaaaatatcaagataacatcgtttatggcttgatagatggtacaacttattatttcacctttaacctaaatcgttctgcttttgccaatagcacaaaaacgccagagcaacaagaatctgccaaaaaggcaatgctgaacaaagatttccgtcaagcggttatgtttgcacttgatcgtgcagcttatcaagcacaaactgtcggtgaggaagccaaaaccaaggccttgcgtaatatgctggtaccgccaacttttgtgtctgccgatggtgaagactttgggcaaatggtgaaaaaagacttggtaggctatggtgcagaatggcaagatgtcgatttgtcagatagccaagatggtctatacaatccacaaaaagccaaagaagagtttgctaaagccagacaaactttagaagctcaaggcgtgactttccctatctatttggattttccaattgaccaagcagattcgaacagagttcagcaagctcaatcattcaagcaatcggttgaggcctcattgggtcaagaaaatattattatcaatgtcattgaaaccgagacctcaacttatgagtctcaaggctactatgctgaatcgccagagcagcaagattatgatattatgatggcaggttggggcccggattatcaagatccacgcacctatttggatatcatgagtcctattgatggtgccatgctacaaaaaacaggtatccacagaggtggcgataaagctttagttaaacaagttggtttggatacttatcaaacactgcttaatcaggcatcggtcatctctaatgataacagtgcgcgttataatgcctatgccaaagcacaggcattactgcttgacagtgctttacaaatcccaatggttgctattggtggtgtaccaagagtttctaaaggcgtaccatttagcggatcattttcttgggcgggcaataaaggcggtagctggtataagagattaaaactacaagcacagcctatcacgactgagcaatatgagaaagcctatcaagcatggcaaagtgaaaaatcggcttctaatgccaaatatgctgacagccttgttaatcgtgtcaaaaaatcagatacagcagcaagcgatgctgcagcaactgatgctgcaaccacggatacgacaacagcgaattgatttaatcaatcagcaatcaataaaaaagcatggttatccatgcttttttatttgggtagtaaaaaaattatcttgggttgcagtttttgaacaaagttttgttctttgggtcggtgatgactgcaataccgacttgattgtagttcttggcatcgatatagtctgcagtcatggtataaccaccaaagccaaaaattgagcttgtcatatctgatgtgttaagattgatgggcataccgacagttttgccagagaagctagcaacggctttagatggtaaatctgcatcgttaaagatgtatttaacattgacacttttaccgccttggcaggtgtattgtacggtttttggactcatggcattggcagaaatagccatcatgccagcagtagccacaataagactaaaggcaagttttttcatgatattttccttatgtatcagtcataatgacttgtaattgggtatgattgaatgtcttagaatgatgattttgaccatcaagcgtgagagtaaagattgtttcggggttagtgatagggcatttgattggctctagattgattgcttattttaccaacctagagcctatctttagccattaaatcaaatacccaagttaaaatcaagtgatatttatgattaaaacttgggattaaagcttaccttattaatattatttttattaatattatgttaagcgttaaagttttgtaacatatctgacattacagcctttatgagcaaaatcaccagaagggcttgtgatgttaatgcctagtttgtgatagttatacaatgtcatggcatcagtcatcaagctgtagttattttcatcaccaaaaacgctatcaacattgtcagaacgatttaaattaaatggcataaaacggtttttgccatcaacataagcactggcataagttggcaatctttgttggttaaagccataagttacggtggcttgcccacctgattggcaggcataagtaacttgacgctttaatacggtagaatcatgagcttcttgagcatggtcaacttgagcatgagctgcaccaatgaatccaacaagtgccaaggcagtcgcaggggctaaagctaagattttcatagaatacctccaaatgttgttatttaaaagctcaaatttaaacggttttgtgtataaatttggctcagcttccacttttatcaataatcaattttctaaagcgatcggcataataactttaggcttttgataataataatataatcctatataaaaataaataccatagtattatggtaaataacttataattaaggtaagaatacggtaaaagattgttaccaatgcgtgattgatacaagtattgataccagttttgacatgtgccttgaaatagttatcttaaacattgaaatatacttaattaagtgttgcatatttgatgattttcttgtagtatcgttactctactgtgatataacaaaacataacatcaatattttaacagaattgttacattgagtatgaatgttaaatcatgatgaccatcgcaggcaatcataatcgatgcctgatagcatagatgaaactcaggctaaaagttcagcgataagccaaacttgatggctgaaaatctatgataaccaacctaggaaacttcaatcaaggagagatgtatgaaagcacaatttacaaccctaaaagtcatcggcggactatttgtaggtggcatgatgctaaatgcacatgcagcacctgaattatatggttacgcaaatcttgtcgtttctgctaatcataaaaaaacaaccaacaagacaaccaatgtcagtacatcaacaacagaccgcccctatctgtatagcagcggatcacgcattggccttagagggtctgaaaagttaaatgatgattatgaggttttgtacaagttggagtaccgtctagaaaatgatggtgatttacgcaatgaaaaaatcaagcagccagatggtactgaaaagactgttgctaaaacacgcaattttgaggctcgtgattcatggattggcgtgaagcataaaaagtatggtaccatcaaggcgggtcgtatgttgtctttggatccatatgtgcgttatactgcctatttggcgtcaggcgtagatggggtgcgtaccaataataccattgcatacgaatcaccaaaaatcaaagatgttagttttcaggcgatgtacatcttagatgaaaataaagagacagataccattgatcgtgatggttattcattgcttgtcaagaaaaacacagatacatataatgttggtgcagcttatgcctattttggtaaagcaaaaacctcttatggcaagattaactatactgcgcgtgtgacaggtaattataaaattaatgaggattataaagtaggtggtatctatcagcatgtcggctatgccaatgacgacagtgccaaaaataatacagaacaagctgttggcgtggctttgcagcattttaaagacaaatggactcataccgcacacatgaatcttgtgaataatcctagtgggaaaaagggcgatgggtttgagctgatcggagcaattgaccgtgatatttctaaaaatgtctctgcaggcatggatatcacctatggtaactttaactacgcaacagaaaaagaatcttacatcaacccaactatctatgcgactgtatatttttaaccaattcattgttggttaattaagtaagatgtgataaagtcaatttacgacaaggcgacagattgccaatctactcaataaaagtaccacaatgaaaaacaccctaaaagtctcatctttggggtgtttttattgatttttaggatattggtaatagataaaattttttatgatataaaaaaattccttagctattaagatggctaaggaatttttaaatttggctccccaacctgggctcgaaccagggacacacggattaacagtccgatgctctaccgactgagctattggggaataatggtgggtcgtgcaggattcgaacctgcgaccaattgattaaaagtcaactgctctaccaactgagctaacgacccttagcgagtactagaattaatggtgggtcgtgcaggattcgaacctgcgaccaattgattaaaagtcaactgctctaccaactgagctaacgacccatatttttttctagtcggatacggtattccatatcgctaatgtggtgcatattatacccaaaattttttttattgcaagcatttattttaaaaaatttcaaaaaaattcaaatgaatcaaaatttttttaccgctcatgatgtgagtgtaaaccctgtatatcaatcccacaaatagataaaaccaattgtctgattaatcgccaagcattatcttggcttaagcccttgatggctttgtcaatttcataaacctgagtaagccaatgcgatatcatgccatcagagatgttatttgcaagattttgataattcaaaactttattacgccaaataccaagtttttggggatcttggccatttcttagggcggcaatcagatgaatgtcttttgagattgcccataaaataatgctgggtgcggtatctgtctgataaagataattaatgatttttaggcattgattgggctgtctttggatgagtgcatcggataaatcaaaaacgctgaacacgccaccttcggataaaagtgtgctaagatcaggcacatcaattaccgaaagctgtgactgactaggcagagtgtgagcataggacagacgccatagcgtctgataagcggttaataaatcatgctgggtatggcccatcagcatctgccacgcattagcggtgagcgaaagcttaaaatcttgagccttggccactaaaagggcacgccgctcagattcattttggatagtgccatggataatcagcccatgctgatcaaacagcttaaatgctttggtattttgagattttttatcttgtttgggtagcagccaaatcagatgatgtgtgctagtacctgctttggcgtcattggcaaaatctatcaattgacttaaggtggcatcatcaggcttatgcttaccgcttagaatgatggcggtagattcttcaaacagcgatagtgatataagttcttgggtaacctcgtgccagcttttgggggaggtaagatcaatgcgtttcatcacttgatgattggcttgccaaattggacggcatgcatcaatgagccattgaatcatcaatggctcatcagaatgcaaaagccataagccgcttagcgtcattgtgggatttttgagggattcggtaactgccaaaaatcgtttttgcatggctaaggcgtatgtatctgactgccaagcgcatagtactgttcagcgatgcgatgtgctaggctgtcttgtagccatactttaacaatttcgccttgctgatctttggttgatacaccagcttcattgtactgatagctacgctcagcttgcaccactctacgaatggtctgaccgttcatctgatagataatatcagcagttagcaccaagcgaatttcggataacacaccgagcagtttatattcacgatagcgtaaattactgacttggatctgatgggcggcattggtgtcgctcaccacaccaagctgagccatctgtgtttcaagtttgtgtttgagtgcatagctcacagcattattttcggtgatgatatttacatgactataagtcggcactaactgaatgcctgtctcactgatacctcgtagaccaaatccgcaggcggtcaatgatagtaaagttaataccattgcacctgcttgaatcatagattttatttgcatcaagcacccgccacaacaaagctgatgagtttattgggtacgacaatctcttttttaatgtcaccaatgagatacttcgacacactttcaatattcttggcttcacggataagctcggcctgatctgtaccagaggcaacctccatcttaccacgcactttaccattaacctgcaccaccatggtgatggtatcgttgattaaggctgatttatccaagactgggaaagcttgggtgcgtgcatcgatttttagtgcttctaacaaatattcgccaacatgtggagcatataaagatagcagtgtcaataacgcaacgatagcttcatggcgtgcagcaatgtcattattatcagttggtttaaagcttgcaatttcattacaaagctccatgagactagagacgggcgtattaagcgccaaatgctcgcctaagctgacatctattttagcgatggtttcatgagtttttcggcgtagatttttggcatcttttgaaagcgtgtctttatgaattgttagatcatttgattggtgattttgaatggctgacaaatgctcaccaacggtacgccatacttttttgataaaattgtgtggaccttttaaggcactgtctgaccattcaagtgtttggtcggctggtgcggtaaatagtgtataaagacgcacagtatctgcaccatattgctcaataatctcttgagggtcgacaccattatttttggacttactcattttttcaattttgccaatggtgacaggcttgccatcggcttttaaggtagcgccttcgatttcggtaccattcatgacaaaatcaatttcatgcgggaaatagtaagttgtactaccatcattgtttgagcgataataagtacctgccaaaaccatcccttgagccaacagattggcaaaaggctcatctttacttaccaagccttcatcacgcatcactttatgaaaaaatcttgcataaagtaaatgtagtaccgcatgttcaacaccaccgacatattggtcgacaggcagccatttatcggcagcagtacgctcaatcatttggctgtcatcgtgtggtgatacaaaacgttgagcgtaccagcttgattctacaaatgtatcaaaagtatcggtttcacgctcggctggctgaccgcactttgggcaagtggtctgtagaaattcgggcatatttttgagtgggttgccacgcccatcagggataacatcggtgggcagcaccacaggcaaatcagcttcatcgacaggcactgtaccacagtattcgcagtttaccatcggaattgggcagccccaataacgctgacgactcacgccccagtcacgcaggcgatactgagtggtggtttgacctaagcctttttcggtgatgatttcattgactttggtgactgcgtcatgataagacaagccgtccaaaatgcctgaattgatacaaaaccctgtcttatcactgtaccagtcttgccattgattggtgctatagttacttggtttgtccttaaaatcaatgacttgtggaattggcagattgtacttattggcaaattcaaaatcacgctcatcgtgtgcaggtactgccatgacagcaccagagccatagctcatcagtacatagtttgctacccatactggcacatcggtacctgtgatgggatgctttgcggtcaagcctgtattgataccgactttttcagctttggcaatgtcagcttcagcgaccgagccttgtttacattctgcacagaattcagcgatagctgggttttgtttggcggcatgctgagcaagcggatgttcggctgcgaccgctaagtaactgacccccatgatggtatcagggcgtgtggtaaagacacgcaaaacagcatcatggtcatcgattgaataagtaaaatccaactccataccttggctgcgaccgatccaattttgctgcatagagagtacttgctttggccaatgcccctccaaggtttttaggtcatctaacagctcatcggcataatcagtgatcttaaagtagtacatcgggatatcacgcttttcaacaatcgcacctgaacgccagccacgaccatcgaccacttgctcattggcaagaacggtattatccacagggtcccaattgacggtggcaagttttttatataccaagccttttttatacaattgtagaaatagccactgttcccagcggtaatattcaggtgtgcatgttgcaaattcacgagaccaatcaatcgaaagtcctaatgccttgagctgttcacgcatattagcaatattgtcaaaggtccatttggcaggtgcaaccgcattagcgatggcggcattttcggcaggtagaccaaaagcatcccaccccattggctgcatgacttcgtagcctttttggcgataatagcgactaagcacatcggtgatggcatagttgcgtacatgtcccatgtgtagcttgccgcttgggtaagggaacatcgagagcatgtagcgagtgggtttatccgttgtttcgttattggtgtggtagcgtttgtcgctttcccattgggtttgtagttgtttttcgatggcagaaaaattataatcttctaaagaaatttggctcatattgctatccaaaaaagtggaaagttaagaaataaacttagctattatacccaaatttactgatactttgctatactttgatcactttaaataaaaaacttcatcaaggagacaaaccgatggcaatcaccatttatggcatcaaaaattgtaatacaatgaaaaaggcttttgataaactaaacgagcttggcaaaacatatgaattttttgattataaaaatgagcaactgactttggataagtttggcaaatttgtggcaatctttggcgataaggttattaataaacaaggtatgacctatcgaaagcttgatgatgatgctaaagccatattaaatggcgatgatgtgtcggcgatgtatgaaattgtcaaaacaaatcaaagtatgattaagcgtccgattattttgggcggtatgaagtcggtgattgggtttgatgacgcagaatatgagcaaatatttgggtagctctaggacggcgaactgattcatcttagagacttgactaaaaatcaatgtcatgctttttggtaaaaaacaccgctgataaaccgcttgccacaaaccaagccaatgccatcgatgccaaagtatggctaaaaaaatgatcgcctatcatcattttataaagccccattgtccagccgatggcactgaccaaaatcacataacgccagcgtttgtgttgtaacgcaggcacaaacgccaaaccatataaaccaaagccagagctggcatgagccgcagggaagcattttgcacgctgttggcttagtatgtcttgccataaagacaaataaggcttatcaccagcaaaaatgagcagttcatgggggcaaggcacatgcgtcagcgattttaatgttgccaccaacagcggtgttaatgccaaaacagcaaacacatataaaatatcagattgcccaaagttagccaaaggcgcataaatgggggcatctctccgcccaaacagcgattttgctgagttgtctgttttatcagccatggtattggtatcagcaatgaattttgtatcggtaatgaattgacgccatactaaagtagtcagcagatacgccccaaacacaatcaacaaccatttgggtaatttataaaacagcatggaaaagacaaattggtctttgcttaataaccagcggccttgctccacataaaaccatgaactgatggtaacatcgaccgaaccatgctcaataaacacagcagtcatcacgatgactgccaatgcaagcagggcttggttgatggggctgatgggagacacagggcgtaaaattgacatttgatgattctacctagctattggaaagctccattggaaagcttatcaatccaaaggattaacaaatgctgttttatctgccgtggcttgtgtgctgacatcaaataagttgagcagtgtcggggtgatggcatcgtggctaaagccagccgttggcgaatttgccactgcaaatggagtgtctgctcccaaccaaagtaacgcaggaatgctcagttgttcttttggggcaaacgccttaggcatgccatgtaaataaacgcctttttctcctaagctttcaccatggtcgcttaaatataacatggcggtgtcagcgtgtgtttgtgctgccaaccaatcgatggtttgttttaaaaagtcatcagtcgccaataacgcattgtcataagcattaatgaccgtttgtcgctcacattctgccaactcgctacttgtacaaacaggcaaaaactgagcaaattcatcgtcatagcgtttataataagcagggccatggttgcccatttgatgcaacactattaatatgtcttgattggcatgagccttgacatggtcatctaaatccaccaacatgcccacatcacggcattcatcataagggttggtgtggcaaatggtgttattgccaccttgaagggggctgtttttgtagtcttgatactgtttggcaggcaggcgattcatcacgccttttgaatcagagttattatctcgccacaatatcgccacacccaagcggtctaaggtgtcaatgacattttcatggtaatcggcggtatcaacatcgtatttttctgctcccaaataactgaacatacatgggacagaatatgccgttgatgtgccacaagaagtgacattaccaaaattatgcacttgccctaagccaatgagtttgtccatatgagggaaagtggctcgctgataaccattaaaagacgcatggtcagcacgggccgtctcacccaccaccatcaccaccaatctgggcttgcgagtggaagcggtggttttttgtatggcatcattggcgtgcatgatggtttcggtgggtttggtggcgtttttataactcatattggcaagtttgcctgctgaatacatcaccgttacaggattggtaaaaaatcgcaacggtttatgttccctaaaaaaactggcgtattgactgctaaatgccaaaatgggcaagccaaccaatgccaaagccacaagataggtaaccagccgcttcattaaacttgctttgagtgtgccaaatgacaatggctgcccaataatccaacagatgggcaaaccagccaacaacacaacacggattaaaagcttcatgcttaataaatctttggtttctgccgtgtcagtttgtaaggcattttgtagcatggtggtgtcgtagacagtgccataggtgtcggtaaaatgaccagcaaaagcagcgattaaaataaaacaaattgccaccgtctttaaggtatgccgatagccaagcaacaccaataagagcaacaaaacgcctgttaagaccaccgccaatgaagcgataaaaagtgcgtaatttgccaatgggtatactgacatgacttgttgaaaaaatgtcacattggcagttgtggtcaaaaatatcgccacaattgccataaacagataagcatctaacccttttaaatctttggtgcggtgatggcggttagaccaaaagcccttagaccaaaagctgttggactttaaaaatttggtaaaagtggtgttgtgggtttggttgtgtttaagggacatggtgcggtgtcttaaagttaatcttgaaacttaaatgataaaaagatgctaagcgatattttaactcatcatgaaataattatgagttaaatggtggtactgccataccccagcgagcgtaaaattgcactacaaattcatcaaaggcatggtgttcgatcgcttgacggatatcaaccatcaagcgttgataatagcgtaaattatgaatggttgccaactgagctgataacatttctttacatttatgcagatgataaagataggcacggctgaagttttggcaagtataacagtcgcaatgctcatccagtggtgtgtcatcggtacggtattggctatttttaatgcgaatcacacctttattgtcatgattacctgtcacaaaataatggccatttctggcattgcgtgttggcataacacaatcaaacatatcaacaccacggcgtaccgcttcaacaatatcagcaggcttgcccacgcccatcagatagcgaggcttatcatttggcatggcacatggtagataatcaagtacttttatcatctcttctttgggttcaccaacagacagaccaccaatggcataaccatcaaaaggcatctttagcaaaccttgtaaagattgcatacgcaaatctttatacatactgccttgaatgataccaaataatgcatttttatttcccaggcgatgatgctcatcaaggcaacgctgcccccagcgtaaagacagctcaagtgattttttggcgtcatcgtgtgtggcggggtaaggcgtgcattcatcaaattgcatgataatatcagagtttaggtcattttgaatttgcatggaggtttcaggtgataaaaagactttagcaccatcaacaggtgagcgaaatgccacaccttcttcgctgattttacgcattgcaccaaggctaaacacctgaaaaccgcctgaatcagttaagatgggcttatcccagccaataaaatgatgcagaccaccaaaatgacgaatcacttccatgccagggcgtagccaaagatgaaaggtatttccaaggataatatctgcaccgataccatggatatcacggggtaacatgcctttgactgtaccataagtgccgacaggcataaatgcaggtgtttggacattgccatgtgctaagctgacagtgccacggcgagcatgattgttgccgccatcggtatgatgtaaggtaaatttcataaatttctctaaggtttttaaatagtaaatatttaaatagtaaatgtttaataagccatcaatcaggcatgatttttgtatcaactaaggtgagccaaattggttgtaagctcatgttactgggctttttccaaaaacatcgcatcgccatagctaaagaaacggtatttgtttttgatggcatgattgtaagcttcttgaatggtttgagtgccagcaaatgctgagactaacattaaaagcgttgattttggtaagtgaaaattcgtaatcaagcaatctaccacaccaaattcataaggtggataaataaaaatttgggtatctcccaaaaattcaaccaattcaccatgaatacgatgaaggtgtgccgtttcaagcgtacgagtaacggttgtgccaacggcaatgatgcggccacctgcagatttggtgttattgataagagtggcagtagacgcaggaagatgagcgtattcagcatgcatgacatgatcggctagattgtcgactttgactggcgtaaatgtaccagaaccaacatgcagagtaacaaaagcaatttgaacgcctttttttctaagctgtgtcaataatgcgtcatcaaagtgtaggctggctgttggtgcagcaacactggcggatttggtgggattatgaaagacagtttgataacgctcatcatctgtttcatcagcctttcgctcaaaatagggcggaatgggcatttgaccatagttatccaaatcagccaaaatgggcgacctaaagcctagaataaataaattgtcttggcgaccgataacggtagcttgcatctgattattggctaaatttagagtttgcccgacttttggtgagcggcttgagcgtacatggcacaaggctttataaagattgttgttgatttcatcgggcaatatgcgttcaatcaaaacctcaaccgctccccctgtttgtttttgaccatgcaggcgagctttgatgactttggtgtcattgagtaccaataaatccccactttttaataagtttggtaaatcggtaaatcgtaaatcttgacagctgttttttgagacatgcaataggcgtgagctggtacgctcatttaaaggataccgagcgattaggtcgtcaggcaaatggtagtcatagtcgctaagtaagacaggttgggtttgttgtgtcatggctgatgagattgtcaataataaattgcgtattttagcaaactttgatcatattctctagcgactgattgcctttatgacgcaccgtaactgtgctaaaatatctaatgatgatagttatgtctatcaaagtgtgagttaatcaatcaaagtcatctggtggtgagatatgtttgaattatttaaaaagaaaaagccaacaactgaccccatgcaagcagtcattgatgagatgatgctctatggacagccgtttaggcaatatattgagaaaatggatattgttgatgataaaatattgcaattacaaatgcgaatttttgagtctgatgataccgctgagcttgaaaaacagtatcataaattacaacaaaagctgtatcctattggtattaaagaggttaatatcaatgttacggtcagctcaaaggataatggctcggacaatactcacgaccacaccacacagcccaatcttatcaaaacccatcatcccaccaaaaaaaccgatgccatctccgctcagcatgatgataagccacccactaagccacccactaaggcagcaactaagcagtcacaactgaacgcccatccacgcatcacccatatcatcgctgtggcttcaggtaaaggtggcgttggtaaatccacaacaacggtaaatctggcgttggcacttcaaaagatgggtaagcgtgtcggtattttggatgcagatatttatggaccttccattccaaccatgttgggcgtggcaaccaaaaagccgatcgtagaaaatgaccagtttatcccaattgatgcaaatgggatggcagtgctttcaattggtaatttgattgacgctgaaaatacaccaattgcatggcgtggcatcaaagcaacaggcgcattaatgcagctttataatcaaaccaactggccacagctggattatttgctgattgatatgccaccaggtacaggggatattcagctaactttggcacagcgtattcctttaacaggggcgattatcgtgacaacaccacagcatatcgcactgcttgatgccaaaaaaggcgtagagatgtttcataaaactgatattagggtgcttggtattattgaaaatatggcactacatacctgtacgcattgtggtcataccgaagcgatttttgggacaggtggcggtgatgaaatggcaaaagcttatgatgtccctttacttggtcaattaccactggatgccagcattcgtgcagcaatggataatggcaaggcggatgagttaattgatgccaacttagcttggcattatgagcatattgctaagcttgtcaatgagtgtgctatacagtttaccaaaaaatccagtgagcggtttttttaatgtagaattttaatatagagtattgatctggtgagctgatattaatatcaaaaagatgcttgtgataagcatctttttgattgggtgaagctatggacaaagggcgtcgataatattttgattggtggtgtcattaaatgccaaattaggatgagtgcaatcaacagaaatgccaagtggatgcactgctgcacggcgttcaaaaaaatacagcgtactgtgtttaatggctggattattaaaatctatccgagtgttgcccttatctaataccacaaattgaaaaacctgtggtttgacatacgaccaagggcgaaaccaagtgcttttttctactttggcaacgacgatgctttggtcaggaagcttggcaatggcatcatttgcccaagcatattcggtatatacctgaaagccaatcattcccaatcctgctgcaacaggtacgatccattttggtgcacgcttataaaataatcggattggcataacaagacctgccaataaaaaaccgctaaagatggtcgccaagatttcccaaaacatcatgattggtttatcctttatatgtgtataaaaaatgtaattttgtgtagtaaaatattatgaataaatattatagataactacagcataaaatgccataaaaattatcacaatcttatgggtgtcaccaaaaaaaactatttaaacttattaaaaaatcgcccagaattctgagcgattttttataagagggtaggttagtggttgattgcaccgcctgcaccttttggataacgaacactttcaaccaaatcttgaacttcttttggcggtggattgcccatggcagatacagcgatcgcaacaatgaagttaattacagcaccaatggctccaaatgacagtggcgagacgcctaagatccagttggcttccacattttcaaaactattggtgcctggaatgaagaaccagcccatgtataaaaatacatagatacatgttgcactcaagcctgcaatcatgccagcagttgcacctgttgagttgatgcgttttgagaaaatacccatcatcagtgctgggaataagcttgatgcagcaataccaaaggcgacagcaacaacctgtgcagtaaatcctggtggattcatgcctaaataggttgcaaccacgatcgcaatcgtcattgagatgcgtgccgccataagttcacctttgtcgttgatatcaggtttgatggttttcttaataaggtcatgtgagatggctgatgagattgctaataaaagacctgctgctgtggataatgccgctgccaaaccacctgctgcaatcaaaccaatgacccagcttggtagatttgcaatttcaggattagcaagtactaagatatcattattggcagtcagctcattaccttgccaacctttctcggcagtaacggttgttgcatattcttcatttttgtcattatagtattgaattaggccgtcattatttttgtcctcatatttcaaaagaccagtcgtttcccagtttttcatccactctgggcgtgcttcgtatgccaatgctggctgattaagcccttgtgggtaaacagtattgataatatttagacgtgccatagaacctactgcaggtgctgtggtgtataacagtgcaataaagatcaatgtccagcctgccgagatgcgtgcatctgatactttaggcacggtaaaaaagcggatgataacatgtggcaaaccagcagtaccaatcatcaaagacatggtcaataagaacatattaagcttatttggcacatcagcggtatactgagcaaagccaaggtcagcaaccagcatatcaagcttttgtagaattggcatacctgtactgacatcattgccaaacatacccagctggggaattgggttaccagttaagttcaaagaaatgaagatggcaggaatgatataagcaaccatcagtacacagtactgagcaacttgggtataagtgatgcctttcatgcccccaagaactgcataaaacaaaacaacaatcgcagcaatgataagacctgtgttgctatcaacttctaggaagcgagaaaaagcaacgcctgcacctgtcatttgaccaataacatatgtcgtacatgccaaaatcaagcagacaactgcaactaagcgagctgttttactataaaaacgatcgccaataaagtcaggaacggtaaatttaccaaacttacgcaaatatggtgcaagcaataaagccaacagaacaaagccaccagtccagcccatcagatatgcagaggcagcataaccacccatggcaagcatacccgccattgagatgaatgatgctgcactcatccagtcagcagccgttgccataccattaacaacagggtgtacaccaccgcctaccacataaaattctttggtagagccagcacgagcccaaatcgcaataccaaaataaagagcaaatgacaaactaacaaaaatgatattaatccaaaattgactcatgggttagtcctccttgaccccaaagcgttcttcaagcttgttcattcgccatgaataaaaaaagattaaaagaataaaacacaaaattgaaccttgctgaccgaaccaaaaacccaagtcagcaccaccgaattggatgcctgacagcattggtctaagccaaatggcaaagccatgggaaacaagtgcccaaataattaaacaaatagtaatgattcggacattggctgcccaatatccactggtatgatgatgttcatgttgtgacatagatcactccttgtcaaaggagcagggtaggcgtatcatcaatacgatatgatgtcatgtgtgaagctaatccctgcttacaattttccttttgttacctgatttgatgatgataaaaccagcgtgttaacaccgtgttaatagttggctggacaaatcagatggtcatagcatagcataaccatcatcaattacaatcttttttatgaattttttataagatgaagcttctataaaactaaccaaacaagatattaacacaaaagcacgcacagatgattattgtgatggtgagcattgtcaagcactgagcaacccattaggattacagcttaaagatggtaaagttgtggataaaaatggcaatccttttacggttgctgcaggtgaaaacggtaaagctgtgcttcatgcgaatggtaaagtgtattcagattttgacagcaggcgtgttgatcagcattggtttgattgtgatgtctttgactgtgatagtccagttgatgcttatgaagcaaactatggcaggtttgttcgcaccactaaagtcaacttggatcgcagaaaaactgatcctaataccaataaaacttacgcaacgacttctcaatattctcataagatactgatgccatttccgtcaagccaagggtatttagaaaatttatattctgatcgtgatttaaataccaataccaagcagatgaatcttgactttaaaaagtggctggataaaggtagtgtatctcatcacatgacttatggtgcaagctatgaaacaaccgaaaaatccatggtcaataaatctggatataatgcttggtcatcgacttggtggagtgataaaaccttaggctgggattttagtgaaaaacttcgtacctgtgataattcatcaacatttaatggtctgttgtgcccaagacacactactttttcatttttaattcctgtaaaaaccaaagatggctcggtttacttaaatgactctgtcttaattggtgatcgggttcgtttgggattgggatatcgctataaccgtatcaaatatcagccaaattatatacctggacaaactgccaaaattccagatgatttggtcaaaggtctatttattccactaccaagcaatgatgttggcgaagaaccaaaatggtagagctcaaaatacagtggtagaaatgacccaaaatttagaaccgatttggcggattatcatgccaaaaaagaggcttatgagaccaaacttgcccaaaaccctgcaaaaaatattgcttatattggacaacccaaaacccattcgcagcattcatacagtctctcgcctgcgtttgatgtgaccaaaaatatcaatttacaggtcaagtattctaaaggcttttataccgattttattgattttgtttttcgtggtttggaggatattgaaagaaaaagttctagaaaatggtcagtttatcaaagcatgaatcggcaaaatgccaaagcagagggtattgagattaattctgtactaaaattaggcgagctggtgcctgccataaatggaacacagctcagctataagatgacacgccaaaaaggtcgtgctgatggtaatattccgatgaatgccattcagcctgacacctcggtttttggtattggttatgatgctaagaatgaaaaatttggtggaaatttgtacattacccgtgtcagtgccaaaaaggctgaagatacctacaatctattttggaaagaagagcaagcaaaagatagtacgcttagatggagaagtggcggttatacgacggttgatttaacaggttattataaacccaccaaaaacctgacgctgcaactgggtgcgtataatcttaccaataaaaaatatatgacttgggattcggcacgctcaattcgaccatttggtaccagtaacatgattgataagaaaaatgataagggaattaatcgtttcttagcgcctggtcgtaactttaaggtcagcttagagtatgtcttttaataagccaaagcgttgattaaatgagtaaatcataaaaccacccaaaatagtaattttgggtggttttatgatggatgaaaattgatatatttgatcatttaaaaatcagctttcgctaaaaaacctttgggcaaccaaaggttttttaatataaatccattaagactgactgccagcctaaactttgggttcaaacaccaaagcatctgggtcaccagccacacgctcacgcttaacaaataagaaaaatgcggctgttgttaagatggttaagccaaaaccgatatataccgatagctggtaatctagcccaaaaccgatcttattataagccaagaaagtataacatgcagcactcataaagatggcaggaatggtacaaacccagtgcagtttgcgatagcggtataaataacctgccgctgtccacaacatgaccacagcaacagactgatttgcccaactaaaataacgccataaaatttggaaatcaacttttgagataataaaaccaatcacaaatagcggtatggcaatcccaagtcgttttaagagtgtgcgttgctcaacatttaaaaattcagcaatgattaagcgagcagcacgaaaagaagtgtcgcctgaggtgatgggtaaaatcaccacaccaagcacagcgaacacaccaccgatagcaccaagataagcaattgagctgtcgtaaacaacttttgatggtgaaccgacactaatggcttcttgtaaactgaccaaatcaggataaaaagataaaccaaccgtacaccaaatcaatgcgataataccttcagcaatcatcgcaccataaaaaataaatcgaccttcagattcattcatcgcacagcgagccatcaatggcgtttgtgtggcatgaaatcctgataatgcaccacaggtgatggtcaaaaatagcagcggccaaatgggtaaatcacccttaggttgtaagttttgaaaaaaagcatcaaatgacaaaccgcccatgctgctataaaagtagctttgagtactaccaagctcattcataaccaagccataagtcatgccaagcgacatgaataataaaagcccaccaaaaataggatagacgcgtccgatgattttatcaatgggtaataaggtggcgataatataataaataaaaataatggctgtccaaacaacgataatggtttctttggtcataccaaagacggtattgcttgatgtgccagtaacggcagccatactttcagcattatccacagaaattgtacctgtggcggcagtgccaaatatatctatcgtgatagagctaagcagttgtgctgggcttgcaacaaataccacaccaaccaaaataagcaatacaacagcaagcaggttgataaaatgcttaggaatgatacctaaatatttgccagttaagtagggcatacttgcgccactattacgcaccgatagcataccgcacatataatcatgtaccgccccagcaaatatacaaccaatgacaatccagagcatggcgacaggtccatacaatgcccccaaaataggaccaaaaattgggcctgtgccagcgatatttaaaagctgaatgagccaaatcttacccttagacataggtacataatccacaccatctgccatcgtataggctggtgtgtttttattaggattaatgacgaaaattttttcgatgactttgccataaataaagtagccaaccaataaaatggttacacaaaaaaagaaccataacataatcaattatccaacaaatggagtttgagccacccagaaaaattttgggcaggcggtgtttgcaacaattaggtataaaataacgaaaaattaccagaatgtaaagaaaattgtatgattctatcttgataaaatcatatttattactaagttttaaattaagcgaatattcatcatcagcttgattgataagaagataaaaaaagattggataaataaaatccgcccaactttgttgaaactttgctgagcggattttttggtacttaaagtactatttgggcattaaagtatcattcgtaattttcaatgctcgggcaagcacaaatcagatttttatcaccataaacatcatccacccgacccaccgaaggccagaacttatgtgccttgatataaggcaatgggaaggcagcttcttcacggctatacggatgcgcccattcgcctgttataacaaaggcggtgtgtggggcattgacaagtggattgtcatctggtgtccaaccatcttcgcctgtttgcacctttaaggcctcttgtttgatttgctttaaggcactgatgaggcggtcaatctctgctttgctttcagattctgttggttcaatcatgagcgtgcctgccacaggaaatgacatggttggtgcatgaaagccataatccatcaaacgcttggcaatgtcagtttcagagatgcctgtttgtgcttttaatgggcgaatgtcaatgatacattcatgagccacacgcccatttttaccagtatataaaacaggataatcttcgcttagcttagttgcgatataattggcgttaagcagtgcttgtttggtggctgataaaagaccatcacgacccatcatggtgatatacatccatgaaattggcaggatatttgctgaaccataaggagcggctgaaactgccgaacagtcagactgggcattaaacacagggttgatacgatggtttgagataaaaggtgctaagtgtgattttagaccaattggccccataccaggcccaccaccaccatgtgggatgcaaaaagttttgtgtaaattcatgtgtagtacatctgccccgacatcagcgggctgcatgatgccaacttgtgcattcatgttagcaccgtccatatacacctgtccaccgtgagcgtgaatcatatcacaaatatcacgaatgccctcttcaaaaaccccatgcgttgatggataagtaatcatcaaagcaccaagcttatcgctgtgttcatcacatttggcttttaggtcatcaatgtccacattgccattatcatcggttgcaacgaccacaactttcatgcccatcatctgagcagttgctggattggtgccgtgtgcggagcgggggattaggcagacattacgctcatcttgacccatactttcatgatagcgacgaatggcgagcaagcctgcatattcaccagatgcccctgaattgggctgcatgctgatttcatcaaagcctgtaatggcttttagctgggcttgtaggctctcaatcatctgaatgtagcctttggtgtcttcgctgggtgcaaatgggtgcacatttgcaaactcatcccaggtgatgggcaacatctcactggtggcgtttaatttcatggtgcaagaacccaatgaaatcattgaacggttcatcgccaaatccttatcctctaaggattttaggtagcgtagcatttggtgttcagtgtgatgactgttaaacacaggatgggttaaaatgtcatcttgtcttaataaatcgcccaattggatctggagggcatcaaggctgcctttgactccaaagatttgacacagttcatcaaactctgcttcatcggtaagttcatgaaatgatacagaaataccgccattgtcatgctgccataagttgtagcctttgtctttggcggtcttaaaaatcgtttgtgcctgccctccacattcaaccagtacggtatcaaaaaacacatcatgacgcactgccagctctgatgatttgaccgctttggcaaaggcgaccgctagggcgtgaatgcgtgtggcaatgcgttttagccctgccgccccgtgatagacggcgtacatgcctgccagattggcaaggagcacttgacttgtgcaaatgtttgaattggccttttcacggcggatatgttgttcacgggtttgtagtgccatgcgtagggcggtattaccttgggcgtcttttgatacgccaatgatgcgaccaggtgccgagcgtttgtctttgtctttaaaggcaaaataggcagcatgtggcccaccaaaacccatcggaatgccaaaacgctgtgtgcttcccaaagcaatatcagcacccatatcagcaggggattttaaaagcacaaggctcatgatatcgctggcaacgatggcataagctccgttgtctttgacagcggtgatgacatcggtcaaatccaccacatcgccatctttaccgacatactggaaaaatgccccaaaaaactcaccatttttggcaacatcaaaatcacccatcacaatttcaaagccaaaatatttggcacgagtatgaatgacatcaagggtctgtgggtaggtacgctcatccacaaaaaaggcgttggattttgatttactcacacgcctagccatcgccatcgcctcagcggcggcggttgcttcatccagcaggcttgcccctgccaaatccatgccagttaggtcaatacaaacttgttggaaattaagtaaagcttcaagccgaccttgggcaatctcagcttgatagggcgtataggcggtataccaaccggggttttctagcacatttcgttggatgaccgcaggcaggcgagtgggtgagtaaccttgaccgatatagcttttggcaacggtaatattatctgccatggcacgcagttttgccaaggcgttatgctcactcatggcctctggtaaatccaaatctttattcagacgaacggctttgggaacgacagcatcaacaaaactgtccaaatcatcaaaaccaacggtttgtaataaggcttgttgttcattggcatctttaccaagatgacgatgaacaaaagcattttcatagaataattctgaaaaatcattaaatgacataaagttttccttgtgctgggctttaaaagttagtcaatgggtgtttaaattgattaaccattgatggatgattgatattttatcaattatttgcccatttaattgccaataaggcatgatgcaaatatgccaataaggcatgatgcaaatatgtcaatggggcatgaggtaaaatcaaatttgccaatggctaatcaatttaaacaatttaaacaagggcaaatttttacccttgcttgatgatttgaacagtttaatgatttaaacagcttacaaagcactctggtactcttcggcactaagtaggtcatcataatcggtcacattggtaggcttgattttaaagaaccatgctttgccataagggtcttcgttggcaagctctgggctatctaccagctcatcgttaatctcaacgatttcgccagcgattggtgcatagacatcgctggccgctttgactgactccaccacggcaatctcttcatcagcagatacttcacgcccaaattctggcaactcaacaaataccacatcacccagcaaatcttgggcgtggtctgtgataccaacggtgatgataccgtcatcttctagttttagccattcgtggctggcaacatattttaaatcagcggggatattactcatgggtctctcctgtgagtttggtgaattaaatgggggttaatgggttaaaagggtgtgcttaaaagcggcgtacaaggattgtcaagctattcatagacgcattgtttgcttgcttcatcataacgaccgccatcatctaaacatctgtctttggcatcacagcctaccaataataaaataaccaaacatgtacataggtatttcatattatttcaattcctaaatcaattcctaaacataataaaacgaacataaagacccaaaagcacgcttgatgcttttggtcagttttttggtgtacaatcaatcaaattgctttttgccatgtctgacaaatggtaatttgagtacacgcacatccatctctttgccacgcatgataactttggcatgctcacctgtaaagctggcaggcgcacgagcgatggcgatggattggtttagagttggggagaataccccgctggtggtgatgccaaacccatcttcggtaatcacttccatgccagcacgaagtacaccgcctttggcaagcaataacccaacttgacgcattttgacgccgtcattttttagggcgataagggcggatttaccaacaaaatcacggttttcattttttaaatcaaccgtccacgccatgcctgcttctagggggctgacatcatctgtcatgtcgttaccgtatagattcatgccagcttccatacgcaaggtgtctctggcaccaagtccacatggggcgacacctgctttgatgagttcatcgaaaaacccagtcgcttcatctgctggcatgaccacctcaacgccatcttcacctgtgtagcctgtataagcgacaaaccaatcatcactcaaatccacaccaacaaagggttttagggcattgactttgtctgtccattcaggcttgacggtaaggagtttggtgatggcatttggcccttgtatggcaagcatggcaacatcatggcgtggggtcaaagtgacaccaaatgccccgccaactttggcaaagtgtgcagagtctttttcacgggttgcgccgtttgagatgatgcgataagcactctcatcttcgttcatgcgatagacgataaggtcatcgatgacgccgccatcatcgtttagcatggcagaatataaagccttaccgacaaagcctaatttggcaacatcgttagcaagtagcttttgtaaaaaggctttggcattatcaccgttgatgtcggtaaccagcatgtgcgagacatcaaacatgcctgcatctgtccgcacggcatggtgttcatcaatttgtgagccataattgacaggcaactcccaaccgccaaaatcaacaagtttgccattgtgttcggtgtgagcatcaaataaaggggtgcgttgtggagcggtcatggttcattccttagagtgatgagtgcaaaattagggtgttatttttaagacatcatcataaagcttatcttagaaaacttatcttaaaaaataacattaaaaaataataccaaaattagcaccccatctgtcctttgacctgagattttcaatgatgatgctaggtttgattttatcatcattttcttcccttcggtaggtaatttaccattctccagattgtgttggtaagtttccctaccgagaattttcagtccatttacctgagcgattatggggaatgcagtgctaagagcaatgccgtttacgccttcggtggtattttgagaccatcaaaatacactctcctgaaaatcagaccttcttattatgaaaaataatgctacaatttacaagtgaaattttaagctttttaaaaataattggtaaaataaaccaaaatcgttcaaaataaatgccaattatcaatatttttaagaaagattatttaaacaattttattaacattttattaaggatttttgaatgcattgtgatgtttataaatttccaaaaaatgaaggttggtatgtatacatcgcccgacctgactatccaaatgacacagaaaaccttaaggattggctgggtgttttgcctgcagcaatgcgtaccaaacttggttttgggcagtttattatgcatttagatttgtcatcaaggcaaaaattagctcaggcggacattcatcaagttaaagccaaacttaacgaacaaggctattatgtgcaagcaccgccatcggagatgttggcagctcaagcggctatcaaagcccaagatgctcaggataaacaatttgattaattttaatcatttaattttttatcaaattttaaatataactaattttaataacatttttatgcttgaatgattaaaaaagtgttagaataacccaattttatttttggtcaaaaatcaatgaattggttaaaaaatttaccgcttgagaaaatcggtgaagcactggcaggcttttttggcttttgggggcgattgacggagggtgtgcctgcaagtcagttgccgttcatcgtttatgtcgtctgctgtggattggtgttactgttgtggcttgttgtcatgcgtctgataccccaaccttttaaggggattagtttagcagtgcttgcagctgttatgtttacacctggtcaagcggcagggaatagcggtgagattgcccctgcgatgattggcgtattttatgccattttgatgaaagattttagtgctgcacttggggcagcagtaccgatttttgcgatacttgctgcgttgcttgtggtgggtgcagcttggcagatggttcgaggtgtgcttgtggctaatgctgaaaagcaggcttgggtaagacaagttcaaaagcaaaaacaacaattgccacaatctgaggacaaaaactaagcatttgaccaactgatgaaaaatattgatttgattgggtttaaactaaaccgtcataccaattttgttaaagcaaataagcaatgatgattaaaagataaatcacacctaggcatttttatcttgaatgttttaaaatttggtgtataatatacgccttgtgacttttatctaatatctaagtttacatctccttgccatcatcacaaggtggtggctgttttaatccgtagggagtccttatgagacattatgaagtggtgctactggtacatccagaccaaagcaaccaggttgccgacatggtaactaagtaccgttctatcgtagaagataatggcggtaataaccatcgcctagaagattggggtcgccgtcaattggcttatccaatcaataaaatccacaaagcacactatgttttgctaaacattgagtgtaacgatgagacattggcacagttagaagagctgttcaaatacaacgatgccatcattcgcagtcttatcattcgccgtgatgaagccattaccgaacaatctcctttggcaaaagaagccgaagacaaacgcactcgtaaagccaaccgccgtaacgatgttcgcactcaggaagctgagagtgataacaccgcaagcgaataattaaggagattactcatggctcgtttctatcgtcgtcgtaaattctgccgtttcaccgcagaaggcattacccacattgattataaagatgttgaacttttaaaacaatacatcagcgaaaatggtaaaatcactccaagccgtatcacgggtacttctactaagtatcaacgccagcttgcagttgccattaaacaagctcgttatttggctctattgccatataccgacaaccacaagtaattaacggagataaatcatgcaagttattctattacagcgtgtcgttaatcttggtaagcttggcgagactgttgatgtaaaagcaggttacggtcgtaactatctcatcccacaaggcaaagcactgcctgcaactgaagccaatttggctaagtttgaagctcgccgtgctgaacttgaagctttggaagccgaagagttattagctgctaatgcacgtgccgaagccttagctgatgtgaatgtcatcatgcgtgccaagtctggtgatgaaggtaaactatttggctctatcggtgctcgtgatatcgctgatgcattaactaaatctggcttagaagttgaccgttctgaggttaaaatgccagaaggcgctttccgtcaaattggtgaatataaagttacgatccagctgcaccatgatattagcaccgatattttagtgaccattttgtcggaagatgcaccaactgccgatgaagatgatagcgaataatttttattaatgatagttatctaaaaacccctaaagtattatctttaggggtttttgtatcatcatctttagatgaccaaattggttggctatcttttggtgtataaattcataaaaaatgttcaattatttttattgatgggctaaaattttttatcaaaatctattaccacaaaagttgattgttgtacaccttatttacataaaaagtacaactttcaccagatatcattacaaaaataatagaattgatctttctatgggtgataaaatacagtgataacatacataaaagttgcatcaaaaatttatgtcgttttatattatattaaacttaaataacttaaacttagtgagactgatatattctaatttgctgtgtcattgattctaaattttaatttcagtaatccaaggtcgcccatacgccaaacccaatatgattatgatgaaagtgccaaaccccaaacttttaacaacttcattgcttgttttaacttcagccatagcagtcttttctttttctgcttgctatcagattggggatgtggtgaatgaggcggcagctgaggcaacacagcaacccccaattagaactcccaagcagactgctaaattaaacgccttcaaaaattcaacctatcaaacagcaactgatgagctacttaaagcttataactggacattgatatctgccgaagtgcaaggagcaccaattcacagctacgaaaatattattaaaaatcgtgcagggagcttaagtttttcaaatcgtgggctttactttaatgtgggctgtaaccatcactctcaacattatcaattatctgaaggtgttttatcaattcatcacagaacatcaactttaatggcttgtcatcattctgacagtaactcacctgatttagctcaagttgaatcgaaatttgtacaggatttaaacggctcaaacctacaaattaaaactggtcctgacgaatacacagccaccttattactccaaaaaggtgctcaggtactcacttggcaaggtgatatgaaacctgaagttcgttttggggagtcagtattgctattttgggaaattgaaccaaataaaattaactgtattgatgaaattggtcaagagcaacgatgtttaaaagtgcgtaatgtcacttataatgaacaaggcattaagactggctctggtgcatggcgtaccttttatggtcaaattcatgggtatgagcatcagcctaatttgcgtcaaattattcgactaaatgcctacaataatcctgatagtaaagaaaacccatattatatctatgatagacctgttgaaatttactatttggatgttcccgtgtctcaataataattgagatcacaaatttagagtgaagttgtcgtacgatctgaaatagaaaatcatgtgtgataaatcaccttgttttggagagattttatcggcataatatgctttgaataacaatgtcatgatgatgacaattagcccattttatctcatcttatgagcgtaaacatttaaggaaatcaaattatggcaaagcaagttgcagtattaatcggtagtgcaagccaaacttctgttaatcggttggcgtttaactatcttgaatctgttgcaccatcatcactacaatttaaagtcgttgaaatcgcagatttgccactgtatgatcgtgatttagacgagcaagatgtacccgcttacaaccgatttcgtgaagaaatcaaagcagccgatgcagtactatggattagcccagagcataatggtggttgttcggctatgattaaaaatgccattgatattgcatcacgcccaattggtcaaagcgtttggactaataagccattgggtttaatcagtgtcaatgccaatggtagctcacgggtcactgatcagctgcgtaccattgcgacaaatccagcgctcaatatgccaacactgccctttggtgcatacttcggcggtatctttactggggcgttcaatgaacaaggtgagctggtatctgagcacggtcaagcaactttaaagaactttatcaaggcgtatgctgaatttattgaaaagttttagcatcaaccgccatcagttgcacgctgatgtatggtgatttataaccgcccaattttgggtggttatttttatttacaaagctaagctacctattgatttaaaattcagctataatagacaaatctttgtatcatggctttgtgtatgccagaaaaaaatttattaaaaagttcaatcaatcacaacttaataaaaaataagatctatatcattatcgaagggacggacacgcctgccggtaagttatttgatgtgctaatcttagtggcaattattaccagtgttttggtggttatgctcgatagcgtattatttttacgcttgcaatatgggcgtttatttttcgttgctgaatggttttttacgattttatttaccatagaatatgcattgcgtctttattctgcaccaaatcttcgtcgatatgtgaccagtttttatggggcagttgatttattggcactattgccaacatatttgagcttattttttgcaggtacgcattatttgctggttgttcgaattcttagaattcttagaatctttcgtgtctttcgactcaaatcttatatgcagcaagctggatttttggcggctgcttttaaaaccagccagcataaaattacggtattttttctatcgctacttctgcttgtaaccatttttggctcagttttgtatgttgttgaaggtcctgaaaatggctttacaagtattcctttatcaatctactgggcggttgtgacattgacaacggtaggttatggcgatatttccccaaaaacaccactagggcaggcgatcgcaagtatggtgatgattacaggttatgccatcatcgccgtaccgacagggatttttactgctgagctaactcggactatgcggccgcaacttcagccaatttcttgcccaaattgtggtaaatttgggcatgcaactaatgctaaattttgtgaccgctgtggtcatgacttacatgtataacagatgaatttttcaacattttggcaaactgcacctttatctttgttattgatactgagctttattggtttggcgatcgtacagttattgatgggtgttgatatagatgccccaagcacgcacgacttactacgatttggtgctaactttatgccgctgtcgatggttggcgagccttggcgactgcttagcagtggatttttacatattggtatattacatctgttattcaacagctttgcgatgtattattttggacaagttaccgagattatcatcagctccgttcatgttggtttgttatttattttggctgtggtaggcggcaacttgcttggaaattatttggcatggcaggctgtgtttttgggtacacctttagctatcagtgctggagcgtctggcggtatcatgggattgggtgcatttttattttcattggcattgctacaggcacccattgcacttaagctaaataccaaaactttgggttttgtgatggcgattaatttactgatgggttttgctgtcaaggaaattgatcatgcagggcatattggtggcacacttgttggatttactcttggtgtggtttatcgttatgctttgtcttatcgtcagtataccaatttaatattgactggtgcaatgatgggcatggcgatgctatttggggtaatttggtattggttacattggcaaatcatggcggtgattggctgaattaaaccttaaataatatcccatcatggcaaatgacgggatattattgcataggatttgacgatttgttgcataaaatctgcgtgccaacaccttcttcggtaaatatctcaagcaaacatgcgtgtggcacacgaccatcaacgatagtaacgctgtgcaatcccgatctgatggcttcaagtgcaccttcaattttgggaatcataccacctgaaatggttccatcagcaattaagtgatcaatatctttggctgataaatgggtgagtacacgaccttgtttatccagcacgcctttaatattggtcagtaaaagtaagcgttcagccccaagaaatttggcgacacggctggcaaccaaatctgcattgatattataggtatcgctattgacatccaccccaagcgatgcaatcactgggataaaattactggcaatcagtatatcaaccacttcttcatttaccgaatcaacttcaaagacataacagatttctagtaactaagttgataaaggaaagtaatgattaattaatggcggccagaagacccaaaaccacctgatccacgagtgctgatatcactaaaagtatcaacaatctcaaagtcaggacgcattatgggaacaatgacatattgtgccattctttcggcaggcttaagctcaaagttggtatcgctacgattccatatcgagaccatcagctcaccttgatagtcagaatcaatcaagccaaccaaattaccaagtacaatgccgtgcttatggccaagtccagacctagggagaattagcccagcaaaattagggtcgctgatataaatggataatccagtgccaacaagtttggtttctcctgcggcaataatcattggctcatcaatacaggctcgcaagtcaatccctgctgagcctgcggtagcatgcgttggtaggggaaagtctggatgagagccaattttaggattaaggattttgacttgtacgcttttcatagggactgcttatttgatggtttttaaggctatcatgattgaatttttatgcaatttttgtcaagacctttacctatcgttgataaaatgataagaataaagcccgattatgatcgagctttaaagtatcaatctgtcacttaggcattgccttcgtcattttgggtttctagctgactttgtaagaaagcttgttcaaaattcacaggtgcaagtagtaactgcgggaagctaccacgcgtcacgatatcgctgatggcttctcgagcataagggaataaaatatttgggcaatacgcttgtagcaaatgtggcatatctgcttcagggatattacgcatcaaaaaaatacctgcttgctgaacttcagcgatgaacgcaactgactcaccaagcttggcagttacgctgacagtgagtaccacttctttgtagtcttcatctaaatcgttatcgcttgtgctgatgctgacatcagtttcaggttgccattgtttggtaaatacttcggtatttggcacttcaaatgaaatgtcttttgtgtagatacgctctaaaccgagctgtggctgaagttcttcagacatgataattccttaaatgtgtgttatttgtatattaattcgtatattaaaaatggctaaatgattgcgccaaaagctcatcaagtttgccatcggcatttaatttattaagctgatcaaaaccgccaatgaaattatcaccaataaagatttgtgggacagtacgatagccattggttttggctgagagtgcttcacgatcctcagcattgatatcatacatgctaatctcatcataagcaacagatttattattcaaaagctgcttggcagccaagcaataagggcaggtcggtgtggtatagatggttactttttgcattgccatttccattaaattaggtccacatcttatataaggcttttcatgaatatttcaaggcttattgataagactaagccatgatttttagctaaaatgatttaaactactttttattagtaccaaccaaaggcaagcccgctgattgatagccttgaataccgccttcaagacgcataaaattgggtcgattgatcagctgtacagcagcacctgcttgcatgccaatatcacaaaccaaaatcacaggcacttcaatggcttgtaattcagctaggtgatttttaaggtcgttaaacggtatgttttggctaccagtgatatgaccattggcaaacttgttagctgggcgaatgtcaataatgcgagcattttgattattgaccaataagcccaattcgcttggcggaactttacgaccactgcgtttgccttcgatggcaaaaaatgcaatgattaatacaatcagcaatccaactaagactggatgattaccgataaattcaaaccaacgttccaaagtatactccaatgtctaatcataaaactcgtattataacgccaaatgtatctaattgcaccgtttttcatattcatgatgaatcatgagcagattggtattatttggcagaaggcttaaccgcactttgacccgccttggcttcatcaatcaaggatgtcaggctttcgatacgccttggtaatacctcgccttgcattgccgctgcccataaggcacatcctttggcattgggcgtatgatgacaatcacgaaattggcaactgccagccagcgcatgcaattcttcaaaaccaagcaaaatatcatctgccgacagatgccaaatcccatattcacgaattcctggcgtatctatgatgccacctttgtccatatgatgggcatcataaggcataagtcggctggtcgttgtggtgtgctgaccaagctgtgagttttgggagatgatgttggtggattgattggcattgggtaaaagctcattaattaggcttgatttgcccacacctgattgcccagcaaagatggacagcttaccattaatgtgcctaaaaagtgtctgcaaacctgatttggtgtgcgttgaggtctggattacgctaaagccatattgatcgcccaatgctcgatactcatcgatcatttgcatgatggcatcttggtcatttgaattttgctcatttaataaatcggctttatttaataccaataatggtgtgatatgattaagcttggcgattaataaatatcgatcgataagattaacggcaggcttgggtagtggtgcaaatacgatgacaagcatatctacattggcagccactggcttgaccttatggtagcgatcagggcgggtgatgagtttatgccgatcaagtaaatgctcaatgcgtcccaatcctgcggtcgtatcaaggctaaatttgacacgatcgcctgtagcaagcatgggtaagttggtgcgagcatgacaacgccaaatcgtgccaatctgcaccaaaggtttattagcatctgtgtcaggcaagcttggtatcactgtgggcagatttgttatctgaacatcaagctgcttaccaaagtgcgacacgatcacaccttcggcaaatgtcgcatcatcggcttggacggtttgattttgttcaatttgacgagtttggcgtttggttaatttgcggcggcgaatcagcgacataaatgatgactttcaaataaataagattgactaaaaatgggtatgataatccctacaagatgcaccttaagatgaagattttggtaagcttggtgttcaccactgtagcataaaaaatttacttgggcaaattgtgtttgtggtttttggaagaattcaccaaatcaaatttacttgtgcataaattggctgaatttatttgggaaactgccaaaaatcttttataatacggatttatttttatcattaactcacagcaattaagtgctgattgtcgccaatcgcttaattgtcaaatataaggcaaccatgagtaagctaaatcctcgccaattagaagcgttaaattacacccaaggtccgctacttgtactggctggtgctggctcaggaaagacatcggttatcacccaaaagattgcccatttgatcgaaaattgccgcattcctgccgatcgtatcacggcagtgacttttacaaataaagcggcgcgtgagatgaaatcacgcgttcaaaagattttatctcatgaaaaatctcgtggattgactgtttcaacatttcaccagtttggtctgcaatttttacgctatgaattaaaacacacatcattaaaacccaatttttcaattttggatgcagatgactgccagcgtctgcttgcagaactgatggtgcgtgataatttaagcggtgctgaacgccgtgaactggtgcatgaagccatcaagaaaatctctgattggaaaaatgacctcattgcacccaaagatgccgctgaaacgctcgatgaccctgaagatcttggttttgtgcatttgtatgaattatacgagcgtaatttgcgagcgtataatgcggtggattttgatgatttgattgccatgcctgtgcgtatcttaagggaaagtcatgaggtcaaagataaatggcaaaatcgtatccgctatctgctggtggatgaatatcaagataccaacaccgcacagtatgagttgattaaactattggttgggcgtcttggacgatttacagtcgtgggcgatgatgaccagtcaatttatacatggcgaggtgctaaacctgaaaatatggcacttttaaagcaagatttccccaatcttgaggtggtaaaattggaacaaaactatcgctcaaccaatcacatcttgggtgctgccaatgcggtcatcgccaataatgagcatatgtttgaaaaatcgctttggtctgataaaggtgatggtgaaaaaatccgtgttatcacttgtaataatgattttgatgaagctgaacgagtcgccaaagaaattttgacgcatcgactacgcaataaccagacttgggatagatatgcggtgctgtatcgcagcaactttcaggctagggcgttggaagctcagctaagacagcttgagattccgtataaattatctggtggtacttcattttttgcgcgtaccgaaatcaaggacttaatgggttatcttcgtattattattaatcctgatgatgatgcggcatttttgcgagtgattaatacacctaagcgtggtatcggttcggtgacacttgaaaaacttggactgtttgcacagcactgcggcacatcgctgcttggtgcgtgtactcgtgcaggtgttaaggacgcattgggtgctaaggcaggtgcgatcattgaatcttttggggagtttattaattattatacgcatcagctacatgataatagcgatcctatgcccttggtgcgtcagatgattactgagacaggttatattgactatgtcaaagaaagctccaaaaatccccaacaagaaaaggggcgcttagataacattgaagccttatacttaagtatcgctgcactgattaatcgagctgatgatgagcatgataagaccattgatgctgtgattcgcaagatggttttgttggatatgcttgaacagcaacaagaagaagaaaataccaacaaagttaatctgatgacgctacatgccgccaaaggtcttgaatttgattatgtctacatcattggctgtgaagaaaaactgttaccgcatgtcaattcaatcatgagtgctaatatcgaagaagagcgtcgcttaatgtatgttggtatcaccagagccaaaagtgagctgactttattgctatgtaaacagcgacgatctggagcggattttaaggcggtgacaccctcaagatttcttgatgagttgccagcagagtatctatctggtgctgttaccaaaaaagaagatcctaaaaaagtcgctgaaaactatctggcaaatattcaagcgatgcttgctgctaagaaaaaataaaatagcagcgattaaaaaagttgtcttgcatttttggaatgaatggcttggtatcacatatcataatgacttcatgattaaaaactaagctgcatgtaaggttgatttaaaaattggctaagcgtgcttacgcatgaataaggtcacaacgcccaaagcaatcagctgaaccaccaagattagcccaactgtccaaagccatttgccttgggcataagctaaggcacacgcccaagcaccaatgaagccaccgccataataacccatataatacagccctgacgccaaagaccgaccctcgctgacatggctggtcaaatagctgatggttgcagactgagtgatgaacacaccagaggacattaaagttagtcccataataactatacccaaaggcataaacaatgtcattaataggcctgtgatagaaacaaggatagccaacagtatcgttgaggtcatgccaaagcgtatcaccacgcgtgtggataatggtgtgatgaccataccaatcaaataaatggcaaaaatattggcaagatcggcaggcgtgagtagatacgggctttctgataaatgaagattgatgaatgtaaaacagcccaccaaactaaacaaaacgcacgctcccaaaaatccactacagatgacatgaagatttttggtgtgtgagaataatgtggcaaatgcagtacgaaaattctcagaaatgataaaattttgtgaacgatgtagggatttatatgcccaaatcgcaccgattaatgtgcatattgccatcactatatagccataacgccaaccaataaaatgctccaaatgccctgcaaaaaaccgcccactaaaaccaccaagtaccgtccctgatacataaagtgacatcatagttgtcagtcttgagctgtattcttcactgatataagcaatcaaaactaccgtaatgccaggcacgcttaccccttgcaaaaaccgccaaaaaatcacttcatggatactacttgccatgccaatcagtgctgttggcagagcgagcataagtaatgagcttacgatgaatggctttctaccaacagcatcagacagcatacccataaatggcgatatcagtgcaatggcaagcacggtcgcacctaccgccattcctgcttgaacttcagttgccttaagatctatcatcagtacaggtaaaatcgcctgaactgaatacacttgcaaaaatgcaaaaaatccgatcatggcaatagtgaatttttcactcaaggttggcagatggaaatgaagggcagtcatagtctgattttggctgaagtttttgtctattgtagcacagataaggcgaataaggcttgagctttgactttagataatttttataatacatgttatgtcatttatcaatggcttatttttgggtttttgatgacttaaatgacctaagaacttaaatgatctaagataagctacctaagagttatcctgattaaataatcagccaattttgccaaattattctataaaaatgctaaaatattcacttttaatctccaagacaagcaggaaaaatgatatggcacagactcaaaagatggtattgattgttggcggtggtcatgtcggcttatcatttgctttattgttggcacatcatggcattaaaagcacacttgttgagcatcatcgttatccgaccattgagcctgatgaagataacgcacgcacgcagtatttagacagccgtaatacagcactgtcacgccgtactgtgcaaatttatcaagaaattgggctttgggcgtatcttcagagtcatgcatgccatattgaccaagttaacatcagtgagcttggcagctttgggcatgccaccttaaataaagatgaagaaggtgtggaaagctttgggcaagtgatggaaaatgcacatttaggcaggcagttgttattggcagtcaaggatagtcccttgatcaacttatatgatggtgcaagtgtgattgatatcgctcaagatgaagctcatgcaagcattacagtaaaatttgatacaggtcaaatcaaaaccttaacagcgccacttgtggtggcttgtgatggacagcattcggcggtgcgtcaacgattgaatatcggtgttgatattcatgactatgagcaggttggtatcgttggtgtggtacaaactgacaaagcacataaacatacggcaattgaacgctttagtgaggctgggcctttggcggtgctgcctttgacagatggtatgggcgatggtggcacagggcagacggcaggttatcgccgctcggtggtgtttatttgtccaaaaggtgaagaaggacggtatttaagcgatgatgagtattaccttcagacactccaaacagtttttggtacggcagcagggcgatttgtggcgacaggtaggcgtggtgtatatccactgaccaaagtgctagtacatcgtcaggtatcaggtcgttttgtcattatgggcaatgctgcccatacgctacaccctgtggcaggtcaaggatttaatttgtgtctaagagatgcgtatacactggcaaatatgctggcaaaagcggttgccaaagaaggcagtcaggtggatttgggacaatatgatcgcttgatccgttatgaaaatgctcgccaaaaagaccaaaaacgcgttatcaaattctgtgatactgtcgttggtagcttttgccaccccaatcctgtgatgagatttgtgcgtaatgtgggcttgatttgttttgataaagtgccaggcattaagcctttggtggcaacttatgccatgggacttaagtcttgattttcattggtcatatggcgatacagtataaggatatgtcatgatcttaaaggcgataatgattgtatttgggtgcttatttctgggtcaagtcatcgtaggtttatttgatttattgctgccaccgagcgtcgttggactgattttattatttttggcattgcaggtaggcatagttaagcttgccaccatcgaaaaacttgccaaagtattcatggattatttggtgctacttgtcgtacccgcttgtatttctatcatgcaatatctagacatcattcgagatgatttttgggtgctaatcatcggtgtgagtgtcagcacgattttggtgctattgacctcggcaggctcatatacttggctaagaaaacttcaaaaatctcatgctcaaaccaccaaaaaccaaggcagataagtcagatggataaatttgtaacactgtaccagacgctgtctaccagtccatttttactgctgatgcttttgatgggtgtatttgagctgacaatatgggcaagaacacgcttcaaccagccgttgattaacccaactttggtaacgaccattgttgttatcttgattttaaaatttgccaatatcaaatggcaggcgtttgaacaagccagtagctatatcaccttttggcttcagcctgtggttgtatgtttggcagtgcctttgtatattcaatggcaaaaaattcgtgtacagtggctgccgattttggtgtctcaatttgtggcaagtcttgttggtatcgtctctggtgtgtggattgtacgggcgttgggcggtagttatgatagcatgatcgcaacggcagcgaagtctgtgacgatgccgattgccatcgaggttacccaagctttgggtggaattatcggcattacggcggcaacggtgctgattgcaggcgtggtaggtcagatttttggtgtttggatactttataaatcaggcatgagattgccaatgggcatggggttatcacttggttcggcatctcatgcgcttggtacggtacgctcaatgcagctgggcgggcgttatgtggcttatgcgacattgggtctgattttaaatggcattatgacagcatttttagcaccagtactggtaccttggctggtatcatgatgacagtgactttggtcacactggcaggcggacgataagacggtgattttatttggtaaaccaaatgggggtatggtttgtttagcctgcttacaatttagctatacttttcgatgctttaaggtaaggtacatcatcgccacattgatggcatcgttcaaagcatcatgccttggcaggtcaggcatccccaaggatttaatcatgcctgccatggtcaaatcaacatagctgtcatagtatttgtttttggtttcttgggcataaaacagccgagacacttcaatttttggctgtggcagtttgatacccagcatgggttttaaaaacttattcatcatcaccacatcatattccaaaaaaatatcccacaagcggtcgtccacccacaaactgcaaaaattgctcaatggcaaaatctaccttgacaccgccacttaagtccttgggtcttagtccgtagatggtgacattggttgcttgtatcatgccctcaggcttgattaaaatttcaaaggtttcactggttaagatgcgattgccacggattttgacagcaccgatagagatggtttgggcttcagagatatcaagactggttgtctcacaagcaaagctgaccaactcatcaggatgcgtgtcatacaaaaattcatagcgtttatctttaagctgacggcgataatagtgatgtattaatttatcaaacataacgcaccttaagcatagtgtagattaaactggctactgacatggtgcttaaattgcctcacaacttgtaacgcatcttttaataaatctcgctcaagtgtggataaattttcggtatcaatgtggtttggggcaagctcttggttgtgcttgagtgccaaaagttcattttttaggcgtgtgttcatcagataagccaatgcctctgagacatcttggctaagctgttatcgattaaacccatctgagatagccgtgcgatgcgttcaaaatgttggtcttactaatttttgccttgagtgccaatgcacaagtgccatgcaccacagggaatattcccattttttaatatccattttgtgcttttgtgacccaaaatttgtgcaaaaaatccatgcccatcttcatcaaactgattaactgcccgtgcaaaactcatcagcatccccacatcgctgtccaaatagccacttaggtgcgtgcgtacttctttaagtagtgcttcatcaccgctgacggatttggcatccataaaaattgccaaattcatcatatgatcaggcgtggggtttttgtaccagctgcctacagtttgcttaaattcactgaccgattggcaccatgatggattattgaccataattttacctaagcaaggtggatatccaaactccgccaaaatgccagaaaaacgctcagcataaggctgcatcatttgcatatcaatgccatcacggacaatatcaacgcattatcttgatcggtttttaaaacttgttcgccccgaccttcagaacccatcacgaccaaacaagtattggcgacaagattgacaggtgcaatcatttgccatgctttttcaaacagacggctattaagtacctgcatgagctgggctaattgtttggcttgcatgccattggcgtagagtgctgagatggtgtggttcatctgtgatgtcacttgggtgagagcatccaaattggttgcaacttccaatttttcggcaatcaaatgactgtgattggacaaaaatgccaaaatatcaatttgttcaagtacaccaatgggatcaccattggcggtaacgaccaccctctgaatgcgatgattcatcatttttaataaagcactgaacataaaatcatcggcatcggcacaaaccaaatcaaaatgtgcccacagatgtgtggcatcattggggttaagcgtgcctgatgagtgaatgaaggcatcacaaaatgccgactcggttactagaccgatttaccatcgtggtggatgagtaaggatttggatttatttatctgcatgattttggcggcgtcaatcaaaccaattgagccatcatacaactcatcatatgagcgataagcatcacgcactttggcagtgaataatccagccagctcattttcacggcgattatctgattgatttttgagcttatcggcaatattggcaaaaaagtaagcactaaattcgctgttttcttcgatgagtgtacggatgatggttttgggcatggcgtataataaactttgttcaacggcaataaaactatgccgataagactgtccaaacagcgcccgtgtatcaaagctatctgaagggtgatacagtgccaatatctcgccactggcatcaatttctttgaccatacctttgatgatgatatacaaagtatcaatactatcttgtgcttcaatgatggcggcattatcatcaaaaaagataatatctgttgctttttcaagcacttgcctttgatgattggcagtgtattataaggtacggtactaaagtcaaagcaattcatgccagtcgtcctgtatgcttattttatccatagatccatgcttaatatattagcagatgtcaagaatttcacaagcatcagaccataaattctccagaaacatggtgggtgggttggtggtttttagagcagatttgttttaataagcactacaaaagatggggtaaatgctctataataaaaacaaatttaaacacataagagtaaataatgtctattaaatcagatcgctggattcgtcaaatggccgaaagttatggcatgattgagccgtttgagcctgagcaggtacgctacaatgcacaaggtcaaaagttggtcagctacggcacctcaagctatggatatgatgtacgctgtgctaatgaatttaaggtatttaccaatgtgcattcagccatcgtagatcccaaaaactttgatgatcgcagttttattgacatcattggtgatgaatgtatcattccaccaaattcatttgctttggcgcgcactgttgagtattttcgcatcccaagagatgtactgacgatctgtttgggcaaatccacttatgcacgctgtggaatcattgtcaatgtcacgccacttgagcctgaatgggaggggcatgtaaccttagaatttagcaataccaccaatttgccagcacgcatctatgctggtgagggtgtggcacagatgctatttttccaatcagatgctgatgatgtgtgccaaatttcttataaagatcgtggtggtaaatatcaaggtcaaacaggtgtcaccttaccaaaaacctaaattcattgatgatacaataagtgacaaaatagcacctaaactgaagataaaatacgctacaatggtcaatcaattgagtttcattaactaaggtaaaaaggtttttatgagtgatatttattttgagcgtcagcatggtttggattttgaaagtgccagaacgaaagcacaagcatggctacaagaggccgaaaatcagtttgggctaaatatcaactatatcaaaggtaacaaccaagacaatgcaagcattcataaagcaggtgtcgatgctcaagcaactttgactgctgataaaatcacctttcaagctaaacttggactgtttgctaaacctctaaaaggtgtgatcagttcaggcatcaaagaaggcttagataactatttcccccaaagctgatttgagatgatgatctgtattgatgattcagtagtggattattcattattttaatcatcttaaaatttcataatcttaactatcctttgactgatactcttggacaatcatagaaatcacaacggtagcaaacgcacctttaggtagtctaaattcaagatataactcatcgcccgaccgattccaagtcagatcatacaccatcagtcgaagtgggcgatatgtcaatttggcaccgatttttatcaatccttggtagagtgtttggttgtgattatgattaagcagtgtatcataaagcatccgaacactgccgcagtcacgccgatcaccgatgccaatgagtggtgcagttggatgaatgtcgcactgtttgatacgggttttcacatcatccgttggcatattttgaaaaattgaacccgtaccctctaaattaaaaacatcacccaaaagtgcccgattccatgtaccatcagccacacgcttgcccagcatggcgttaaacagagcacttctggcggctgatatcagcagtccatctttttcggcaaattttttgtggggacgatagggctgatcactcatcagctggctttcaaaaaaactgtgagccttatcaagatttttaccatcgattccaaacctttgttcaccaaaataattcggcacgccgccagatttaatacgctcaagcgtctcatcgatggcatcgatatcaccgttaagatgacgcaggcgaatggcaaaatgattgtatttgtgcgtacctcggttgagtttgcgactatgccaaataagatggttaagtataaaagattcgtcatcattcagatatgctttggcaaaactttccaaagaagtctttggtatcgccttagtgggtaggcgaatactaaaccattgatgcgttattgcgtgccgatctttgagtccagagtagccgacatcacgcataggtacgcccgcccaattggcaagcagctttacgacataggtggtatttagatttatcttggtgatatgtagccacagatgttcaccgttgcctgagtgttcgatgtccaaaatctcagtaacgataaagtcattaggcgtacttttaaaatcagcgtgtaaaacgggtggctgccaaggcagtggtaaagttgttgggctcataaattactttttggttgttttgctttttggttatttaatgatatcaaattgatcaaagtttcggtatgtggttgccattaggcgtatcggaattttatgatcactgtcctgacagcaatttattttaaatggcaaaatcagtcacaataactaaaaaatcatgtatgccataaggctaacagatgaaaaccattaagatgaagattaccaagaagtggccaaattccaatttatcatcaataaaaaccttggtcaaaccgttgatttgaatcaggtttttattatctgatttggtgatactatgctaattatcagagggtatggcattggttttgagcagtttggcggcagtattacccatcttattgacatcaacactgatactctcttggcttagtatatcaccgcttctggcatgtaaagcgataatttgagcaaagggtaaggtagcatcttgggcgagtagacctgccagcataccagataatacatcgcccataccagcggttgccatgccagcattacccaaggtacagatactgatattgcccaaagtatcaatactcaaagaattcgctccttttaaaatccactgtccgccatagtgattttgtagctgaataatggcagccatacgatcggcttcaacttgtgttgcactgatacccaaaagtcgcccagcttcggcgtgatgtggtgtaccgatacagtgatcaggcaggcgagatggtggctgatttgccaaatgccatagtgcatcggcatcgagtacgattggcatatggtgtgtcattagtattgccagccactttttaaaaatgctcttagcccagtcatcacgcccaagccccatgccaaagcatattgcagtcatctcagtaagctgtgtttggtcaatcttatcgatatgcccaagcatcaggttggggcttttgctgatgatggcggtatggtgattgggatgtgtcatgaccgtgactcgacctgcaccgacttgaatggcagcttcagcactcatcaaggcagcaccgcccatgagtgcagagccaccaatgaccatgaccgaacctgcgccgcctttatgtagatgattgctatgtctggttctgttgggtaggctgggtaagcggttatttatgatagcaattggctcaagtaacatatcagtgggaattaacggatgattgataatacacccaacatagtttttggcataacccatgaataacccagctttataagccattaggcacagtgtcatatccacctgtgttgcacagggcagaggtataccagtatcaggatgtagccctgaaggtatatcaatagcgattttggtaccttttatggcattatactgctcaatgatggtacaccaaatatcatccaatgggtgtgtcaaaccatcgccaaataatgcatcaatatgtatatctgcttcgataggcgactgtaaaataggtaaatcagcagcaattacatcttgataagcccaaacagcatcatcactcttagcaggcagggcagggtagatggacacatgataatactccgacaagtataccccaagtaaataaccatcaccgccattgttgccaacgccgcaccaaatacagatagagctatcaggctttagatgagcttttagtgtattggacatcatcagtgcggcttgctgcatcagcccaaaactacgattaccgagcccaacccaacgattctgccagtctttgaccgcatttgctgtatagatgggcgttggaaaatgatacatgatgagtgccttttaatcaggttacaacttgttgggcgatgagatgattggtggcacaccatttgccatcaaagtatcgcttggtgtgccactatgaaagcgtagctcatcatcaggcgactgtatcagctcacattcaatgtcacgaaaaaaagccacccgttcatcaatactgtcatctgtgatggagcgagccaacattaagtagtcttcataatgacggctttctgatttgagtaaatacttataatagcgtgccagtttttcatcatcaataacctctgacaacgccccaaatcgctcacatgatcgagcttcaatgaatgcaccaataatcagcacatctaccatcgcagcaggttcataggtgcgtttgtgtttcaaaagccccttggcgtagcgacctgcaggcagataataccaatcaatgttacgctctttcattaatgataaaacttgctcatagtgcagcatctcttcacgcaccaattgagccaaacgctcttgtaaagtgcgatgaaattcataacgaaaaatcaaattcatcgctgtgcctgctgcctttttttcacagttagcatgatcttggagtagcagtggtagatgttcacatgccaagtttagccaacgctccgaggtgcgacaacctaaaaactcatggatatggctaatatctgtcttggtgcgtgcatgggtcgtgatgactgttagatcatcttcaggggcggtgatcgcttcactcatatatcatccaaaatgtcataaataaatttattataccatagcttaattacccaaatgatagacaaatacctaagttttatattcaaacttatcaatgtaaaagttttgggcaattcattgaacaatatatttataatcgttacagttatgcaatatttttatgttcatattacactcactatctaaaattaagtttataaatattttatttgtcaagatttttaggtgggtaatagcaattaaattgtaacaaattttttaattttattgaatttagtgagctgattttatcatcattaaatcgtaataattcaaaataatacaaatttaatatacagaaaatattatatatatcaatttattacataaatacttattcatattatagaaattttaattattaaggtattgcaaaatattttaaagttggtatcctatagccatagtataaattttagtattccatattgatacaacatgtaattttatgttactctgtgtcatgatgaattatcatcatcgttagcgatacatcggcattttgccagtgtatcttattgacaagtacgattgtactagggaatacacctttccagtggagaaaaccatgaaaaaacttgctctagcaaccgcagaagctgctttatctgaatatgctgtacaagcaacaccgactgtttacggtaaagcatttttgactattgatgccaacaatactgatacaacttataattcaggtcttgtacaattatctgaagataccaatgaaagcgggcttaactcaaatacctcacgcattggttttaaaggttctgaagctttaaatgctaatactgatgttgtgtatcaacttgaatataagattgacattgatgctgatcgtggcgataactttaaatctcgtgatacttacctaggtcttgctcataaacaatacggcacattgttggctggtcgcttaacgactattgatgacagtgttgattttgccagcatgttggaaggtaataatgtcgctgacatcggtcctacttttaatgcccctcgtgccaacaatgcctttgcttatgtatcacctgagtataatggtactcagttcttagctatgtatgcatttgactcagatactgacaagggcggtcttgccaaagatgaccagtttggtgtgggtgcaacttatagcacaggccctatcaatgcaggtgcgacttatattcactacggtgatgacagtcacattcgcctatctggcaactatgcggtttctccagcattgactgtaggtgctttatatcaaatctcagaatttggtgtcgctgccaaaaatcaaaaagccagtcctttgtctgagggcaaggtaggcgataaaaaagaaaacacccttatcgtgagtggcgagatgaaaactgccacgccatggacagcctatggtcaggcaactttgattaaaaatgttgctggtaatgatggcgatgagtcagtgggtgttggtattggtggtaaatatgcctttaataaagccaccacaggtcatgtctacactggctatgtcaacagcgagcgtaaaaatgtcaagtatgagggcagtaatgaaacacataaaaatgcacacaaagatacaaagtttgatggttataagcccagtggctttggtatcggcgcaggtttagaatataaattctaatctttacccgaagcaaaaaagctcatcttaatgatgggctttttattgcgataatcaatttggtggttaaatgttagctatggcttaggtagtgttctggtatcgattaatgattgggctggtgttgaaatttaccatggtttaaaaaatatgcggtttgatgggcaacagtcaaatctgtgagtagccctgtatgactgactggcagtaataaataatccttggcattttgaagtattgtttcagaaacaaagacagtaccatcatgttgagcatcaagcttatttaggcgatgtaatcgcttgtgtagcattaataaaggcaaaccaagcccaaaaggtcgattgcctgcaatgatgccaagctcaataccattgggcagttgtggacaagtaccatcaagtgcgcccaaataagattgattgacgaatggttttaggtatgtgttggcatagtgtgcaacttgactgccgcagtgtggcgttcccaaggtaacacagcgatgtatccgccagacaggataatttgccaaaaaatgccgaatgaccaaaccacccaagctatgcccaactaaattgattgggcgattgacatcatgggtttgggtaagatattgatgtaggttttcactgtgtacggcgatgggctgcatcaaactgcgataaccgtagcgatgggtcgataatcccaaattgattaattttttctccaaaggtttcatataccaagggcttaagtgtaagccatggatgagaatggttaatggtgtatccatcatataaagtacttatttaattaatcacatcttctcaaattgatcagccatcaaaaataactaacacaaaatacacatatttcaaataccaaaaaaacccaaccaattgattgggtttgtcgtatctgtcagattatttgccacggtatgtaatacgacctttggttaagtcataaggtgtcatttcaactttgactttatcgcctgttaggatacggatatagtgctttctcattttacctgaaatgtgggcgatgatttcgtgtccattatctaggcgaaccttgaataaagtatttggcaaagtatcaataacctcgccttcaaattcgataatatcgtctttttttgccataatcttaagtaatcaataataaatttggtctattatactcttttttgatgaaaaatacagcatcaaatgatgattttgtacgatttatcatgaccgtgtacctgatgtcatgattgagtatcaatcaggtaagtttagccataatggcgttagtggcatctgcggtagtagtgattcaaagcgtttatgataataggcattgataaaatatagcccatcagcagatgcggttggtggtgccaaagtgcgattttttgcaagcatcagctcataaaatgtctctggggatatttctcctcgtccaacagcaaataacgcccccatgatgttacgaaccatgtgatgtaaaaatccgtcggcttggatatctagtatcaagtagctgccatgctgaaacaagttggcatgtgtgactgtacgtactggctgatttgattggcaggcagctgcccgaaaactgctaaaatcatgtgtacctacgataaattggctggctattatcatagcatctatatcaagcttagtgtattcatgcgtgacttgatggtgtaaaatggcagggcgatagggctgattgagtgtgatatagcgataacgacgagcgatggcactaaagcgagcatgaaaatcatcaggcatgggctgaacccaccttaaggcaatgtcatcaggcagtaggctatttgtaccacgcaaccaactgtgggctgagcgctcagcgtgcgttacaaaatgtgcaatcatattacctgcgtgtacgcctgcatcggtacgcccagcagcgataagctcaatggactcattggcaatggtggatagtgctttttcgatgacggcttgtacgccgatgacttcttcttgtcgttgccaaccacgatagcgtgtgccgatgaattcgataccgacagccaaagtatgtgttttcatgaggatttccagtgccaagcggtgagcttttgggtgatggatagccaaagtatttggccataaatagacggaatggttaatgaaccagatgcccaaataccatgttcatattgccaagctcctgctgcatagtccgtatttgtgccaccataggcacacatggtggtacaaatgatggcaacgccacgatctgttaactttgccaaagcatcaattatggcttgtgacttaggtagattgcctgcaccatagccaatcaaaatcaccgcacaagcatcagccgctaccaacaattcatcagccagtgcattaggatcgttaggcagtgcatacactgaccgaatcttgacagatttagcacgcttaatcaatgagggtaattgatttaagtaaatggcggtattgatcgatggtggtgatgatttattaaatatggcatctgctcccataaaggcattgggtgcttggctattgattttttgggtatgtttggcattgaatgattgatgatgaaaatggacaaatgtgccacactgtgccgctgccaaatccaaagactgcgataaattattccaagcgtcgctatcataattgatggataaatcagcacattgtggcaataataaaggctgcatactgccagtaatcacgagacttaaatcggtaaattcatcaaatgcatgtgccaaaaaagccgccaaaaaactgagcgtatcagtgcctgtgatgagtacaaattttcgataaccatcatgataagcggtcaaaatcagctcataaaagcccacaaaatcagatggcgtcataaggcttgagtctttgatgatctgattgttcaagatttttatatgatgatcagttgtgccatatagattgctgagtattggcaaaaaaatctcagcaggcaaagcagatagtggtgtgccatggctgccaaaagtgccgccagcatagatgaggcaaatgggtgattgggtaggtgtcataataattaagctgtatttagggctatgtcaactcagatgtactgtgctttcatagaataaatttactcaatattataaataaaactgcctaataaagccatcaaaaaaaggtgcgtcagtcacgacacaccttaatttggtgattttgtaaaatcagatacgaccttgcaggatggcaagcatacgacgcaaaggctcagcagcaccccaaagtagctgatcaccgactgtaaatgcggtcaagtattcgccgcccatattcagtttacgcagacgacccacagcaacatttagcgtacctgtaacagccacagggtgttcaagtaatccggcccttccttccaaatttgggctggcggctttatcattttcaacaacatcaagccatggattgttgctttcacgcagtgcagttgtaatctctgccaagggaatgtctttggtgagcttgatggtaagtgcttggctgtggcatcgcatggcaccgatacgcacacaaataccatcgatattgatggtttcatcagctgatttacctaagattttattggtttcagcttgagctttccattcttcacgagattgaccattatctagctgactgtcaatgtaaggaattaaactgcctgccagtacagcaccaaaatgctgcttgggaaaatcgntctacgctgtgtatcagcaatagttctatcaatctcaaggatggctgaggcggggtcatcaagctgatctgacaccgaatcacgcagaacacccatgcctttgatgagttcacgcatgttattcgcaccagcacctgaagcggcttgataggtcatggcagatacccactcaacccaaccacgacggaatagctcgccaattgccatcagcattaggctgactgtacagttgccgccaataaagtcttttttaccatcagcaagtgccttatcaatgacatcacgattgatggggtctagaatgatgatggcatcttcttgcatacgcaggctactggctgcatcaatccaatagccatgccacccactatctcgcaatgcactgtgtacttgctttgtataatcaccgccttggcaggtgatgatggcatcgcatcgagataactctaggatatcagttgcatctttgagcgtaccgccgtccacaccatcaaaacttggtgcttgaccaccagcattgctggttgaaaaaaatacaggcgtaatgtgctgaaaatcgccttcttcaaccatgcgactcatcaaaactgagccaaccatgccacgccacccaaccaaaccaacaaccattttttctgccattttagataccttttattggtgaaaacgctcaatcaaacccagatgactgaactaaaaaagaatcgcatcctatgcccttttatgactaaaaaatcaagtcattttatggtctttgggcgtttatttttagttaagaaaaattgtatttgatttgatgctaaaaatagtgtgtttgttcaatgatattaggatgaatacgccatgatttgatggatttaattgggtgttggtgttaataaatatgccatggcctgacctactttggttgatttgatgagagtgaacttggcagatgtgtcatcatctagtatgctgtgtaagggtttgtcagcctcaaggtagattctactgtcagcatggattaaggcattgtcaagcagattttctaaaataggctgccataaattgagagcataaggcggatcgataaaaataatatcaaaggcatcgtgtctatcgtgcatggtgtttaaagcactgatggcatcggtgctaacaatggttagcttgtctgatagtttcaaaagcttggcattttgtttaagcatttgggcttgagcaagatttggctcaatcaatgttgctgtttttgccccacgagatacagcctcaaagccaagcgcaccgctacctgcacaagtatccaaaattttggcatcggttaaatatccagtcagccaattaaagagtgtctctttgagcctatctggggtggggcgtagaccttgtgcatctataaagcttaataatctgcgtttatgctgaccgccgatgatgcgtacttggttgacagctttggtggatttttgagtgggttttttcatgacaatgatcgtttaaacagttattgggcgagagtaatatttggttttggattgattagcatgattgatggtcgttagcctaaggctatttttgtcgcaaaaagtgcattgcctttgattttgtattctttaattttgtataatgctacctttgataaaatcaccgcaaacaccatgaaaacatgctacaatacgatgtgttatcatatcatgattttaatcaataaactccatttaactttcttaatcccaagattgacactatgttttcatccctttggcaagctttaagtgagcatcctgaatttatcgccatgctgaccatcccacctgtcacagcatttgtgacttgggcgcatgtgtggatggcacttgagatgttgttttatccgattaaattttggggcatacgcatttttgggctgccgtttagtttaaaaggtgtggggtggcaaggtattgtgcctgccaaggctggcaaaatctctggtattattgttgaccaaacactctcaaaacttgggtctttagatgagttttttcaggcgatggaacctgaagagatggcggagtttatcactgccaccgttgataaaaatctagaaagcttaattgatgaaattatgcttgagcggtcttatactctatggacgcatacgccatatgccatacgccgccgtatttatgcccacgctcactcacatttggcggcaattatgaaatctttggtcatggatttgacttataatgttgagtcgctcgtagatatgcgtgagatgattgttaccaaaatggaaaatgaccgtaagcttatggtggatatgtttttacgggtcggcaaaaaagaaattaattttatttggaaaattagtgctttgattggctttggctttggtgtgctccaaatggccattttttactttgtaccgcagcattggacggtgcctttttttgcgatgatttggggagctttgaccaattggattgccatttggatggtatttaacccagttgagcctaaaactgtcccatttgttcgcctatttcgttatgagatggttgatcatcaaaaacgaatcgtatggatgcacccgcattggcataaatattcttggcaaggtggttttatgaagcgtcaggatgaggtttcaactgtttttgccgaaattgtcgtcaatgaacttgtaacacttgaaaatatcatgaatgaaatgatgtatggcaggcgagcggataaaacccgagagttggtgaaatctcatctttatgagatgcttgaagatccaattgtggcaacaagcctaaaagtgggtatggataagcgtagtcttgacacctttaaagatacaattattgataaatccatcgatgcaacgatggtgcctattcgtgatcccaaactcaatgtttctcgagccaataaaatttttggattatttgaaagtcgtattcgtgccctaactcctaaagagtttcaaaatttattaagaccagcttttcaagaagatgagatcaccttaattatcttaggtggtatcacgggatttttggcaggttggttacatttggtgattgtctttttttagtcaaatatcgttgatttggtacatattacaagaatatcgccatatgagttatcttggagtgggttggttcgtttaaccgataataagctaaccaagctaaccgataataagttaacagataacaatttaacatcaaaaagccccgcaaaattttgccagcaaatgagtgttttactatgctaataacagaacttggatacttttcgctattgcttgcgttggtacttgcaatgctacaagccattttacccgccatcggtgttatcaaacatcaagtacagtggcaaagactggcaccaagtctagcgatggcacagtttttagcgatggctgtatcatttttggcattgattgcaggttttttatataatgattttagcttagtttatgtcgctaagcattcaaatagcttgatgccttggtattataagctttctgcaacttggggcgggcatgaaggctcgttgctactttggatgacaattttggcaacttggtgtatgttggttgctgtatttagccgtggcttaccattacagatgcgtgctcgggttttatctatattaggcggtgtgcaggttatgatgcttgcaatgatgatttttacctcatcaccgtttgaccgtgttttaccaagtttgcctgttgatggtgctgatttaaatccattattacaagatcctggtctgatttttcatccacccatgctttatatgggttatgtggggcttgcagtaccatttgcgttttgtatggcagcattatgggcgggtcgcttagatgcagtttggacacgctggagccgcccctggacattggttgcgtggacatttttaaccttaggcattgctttgggttcgtggtgggcgtactatgaattgggctggggtggctggtggttttgggaccctgtcgaaaatgcatcactcatgccatggcttgccgctacggcactcatgcactctttggctgttaccgaaaaacgaggtgtatttaaagcttggacgatgatgcttgcgatttttgcctttgcattatctttacttggaacatttctggttcgctcaggggtcattacctcagtgcattcgtttgcagctgacccaacccgtggtttggctgtactggcgattttaacaatcgttattgggtttggcttattaatgtttgcattgcgtggttggagattgactgttgaaagcagttaccgtctcaaatcaagagaaaccatgttggtggttaataacttagttttgttggttgcaacattggtcgtcttattgggtactttataccccatcattgccgattttttcaaattaggtcaagtatctgtcggtcctccgtattttaatgcattgtttgtgccgctcacttggcttttgcttggatttatgggcgttggcgttgtcatgcgttataaacacgatagccgcccatttttagcaaccttaatggcttgtgccatcggtgcatttgtacttggatctgcgctggcttatatggtgtctcaattggcagaagagccattgtttgattatggtatttatgtctctgggattttatcgttgtgggtgcttatctttattatcttagacattaaagataaactaaagcatcataaaggcggtattttttcaggcttagccaagcttagcccaagctactggggtatgcagattgcacatattggcgtgattgtctgtatgatgggtgtggcagcgaccagcagtatgagtattgaaaaagatgttgccatgacagtgggcgatagcgtacatgttcaaggctatgatttttatttacaagaatttgagatgattcaaggggtcaattatgatgccactcaagctaccatcattgttagacagcatggtcggcaaattgctgtattatatccccaaaagcgtgattatgttgtcagtatgatgccaatgaccgaagttggtattcgaccaagtttattaaatgaaatgtatgtggcattaggtgagccaatcagcactcaaaatggtcaagtagatatgaatacttgggcggtgcgtgtctatgtcaaacctatggtacgctggatttggttgggtgcaattattatggctgtcggtgcattcatcgctattttggataaacgatatcgcatttaccaaaccaagtctggtaaatattcatcaaagttcaacaaaaccatgacaaaccaataaaaccatcaaaggagtattatcatggcaaaacccaataaacgcttgatgttgtttattattccgctgattatctttatgatactggtggtgatgttctttatgcgacttggcaagccgaccgagattaataccagtcgtttggtgggcaatcccttgccaaacttaagcttacccttattatccgataccacacgcacaatcaccaaggcagattttccagatacgccatttattttaaatgtttggggttcgtggtgtttgacttgccatgctgagcatccatttttgcttaagctgcatgagcaaggcgttcccattattggtgttaattataaagatgagctgtctgaagcgttggcatatttaaataaaaatcaagatccgtttgtttattctgtacaggatgttacgggtgattttgcccttgatttggggctgatgggtgcacctgaaagctatgttgtggggacaaatggcattgtttatcaacatattattggtgagattggtgagaaaaattgggctggtattcaacactgtttgacagcggttgctgatgatggtttatccgatgccaaaaaaattaaagcctgtcataaggatgattcatgaacttgtgtgctttgatgatggtattggtgattggcgtatcaaccaccgccgccgcaagctttgagctgtatgaatttgattcgcctcagcaagaggctcagtatcgagtactcatcgaagagttgcgttgcccaaaatgccaaaatcaaaatttggcaggctcagatgcacccatcgcccaagatttaaaacaaaaaacctatgaaatggtcaaagacggccgtagtgatgctgaaattcgtaattatatgtttgagcgttatggagactttatcagctataagccgcctgtgcgtccatctacatggattttatggttttttccacccatgcttttattacttttgctgttgggctggatttataaagcccaaaaaggtcgctcttggtctaagcaagtccctacaagtcatgcacctttatctgctggcgaagaagcaaaacttaaaaaaatcttggcacatcatcaaaataaatcgttggatggcagtgattcaaaaccaacaaaataaggcatcgatatgacaccaagtttaattttatttttttcattgtgtgctgttttgacggtattgctctctttggtagtcattctaccttggcgaaaagttggcgtatcatctgacaatcaactgatggcgattaatgtgcagatttttggtgaacgcattgctgagcttgatgctgataaagcaacaggggttattgatgaggcatcttatcaagcccaaatcaccgaactaaaacgccagctgatagatgcccaaacgacgacagaagcacaaacgcccgttggtatcaaagggcgtgcaattatcatgatttggattccgatattggctgtcattgcttatatgatgaccgccgatcgtacggcagtttttacactttggcaagctcaagataaagtcggtcaagtggcggacgatttattaactggtaagattgatgtaccgcctgaatgggcagccaaagagtcaacggcactcatcagtgccatgcaaaccaatgtgcatcgcaatgctgatgatgctaatcgctggatgcgtttatctgagctatttatgatgctcgaggcacagccacaagcattagaagcattggcacgggccaatcgcttacagcctgataatgaagagattgcattaacttatgcacagaccaatttttttatcaatgaaggcagaatggatgcaacaacgcataagattttaacccaaatcttaacccaaacacccaatcatgaaggtgccatgatgatgatggcaatgggtgaggtgcgtgcaggtaattatcctaatgccaaagcatggattgccagattacgctcaagtttgatggcacgctcaggtgaccatagtgaagctttggcaagtttggataagttggttgaaaatattgataatcagcaggctgctgttgcccaaggtgtgacgattaccatcaatctggcacccgccttggtagacaagctaagacctgatgatgtcttatttgtctctattagtgggcaatcaggcggcgcaccttatgctgtcaaaaaactgccagccagtgagcttatgagtcaacaagcggttagtgtgacactaagtgatatggatgccatgatgccaacacgaatactgtcatcagcacgccaagtgggcgaggcattggtagtaaatgcacgcatcagccatttgggtgatgccatgcctaaagcgggcgatttggcagccaatccgatcattttggataaacaaaccgaagtgtctttgatgatttctcaaattgtgccataaaatagttataagcctagtattggttaatattgagtttattgataatttataaaatgtatgttgagaagaataatcaggtctttttacttaaagtactcaaagacccatgatgacagttggttgaatgggtgaatataaatattcataaaaacttgtgatttcattggattttatgataaaaaacttgaacaatttctcaatgtgctttatagtacaatctgttactaacagccgcttgccatcaggcagttttatttggagaatacatcatgatgcgtatcattttactcggtccaccaggtgcaggcaaaggcacacaagcccagttgatatcaaaggaatttggcattcctcaaatctcaactggtgatatgttgcgtgcagcaattaaagcaggtactgagcttggtaagcaagcaaaaagtgtcatggatgcaggtcaattggtttctgatgagctgattattaatttggttaaagaacgcttaaaacagccagattgtgacaatggttgtatttttgatggattcccacgcacaatcccacaagccaaagcactggcagatgctggtattgccattgactatgtgattgaaatcagcgcccctgatgatgaaatcgtaagccgtatgtcgggtcgccgtgcacatttggcatcaggtcgtacttatcatgtgatctataatcccccaaaaactgacggtattgatgatgtcacaggcgaggcactggtgcagcgtgatgatgataaagaagaagtggtgcgtgatcgcttatcggtatatcacgcccaaaccgctacattgattagtcattatcaagaagttgccaaatcgggcgaaaatgcccctgaatatcatgactttgatggaacaaaatccatcgatacggttcgtgatgagatttttgctgttttaaaatctgaataatactcagtatctgaataatactcggtcatttgacaataaagcccatcactcactattttgatgatgggctttattgtgccttgatttaatgattttatatattcaatgatcttatatcaaattattgatccaaatgctcatgtaaaatcttacgcagctgtacgatggtttttgggttctcgtgtgtgttgtgtttaccttcaacaataatttcagatgccgctccctcaagatgcgagcttgtataaggtacgatgccatcagaaattgttttaccgacagcgtcaccttgttgattggtattggtatggttgccgataatgctatgataacgcacagatgggctaatttgaatatctttggtcagtgccataaaagaggaatgatctgacaactggcttgcaccattttgaaggtataaagtgcctaagaagctttgggattgaacatcattggtaaatattgtactaagcgatctagtcagttcgataggcagtttgatgatacgccgagcagcgcgagtaaaccagcgatctgcataatctgtaccacgatgaggtgctgataaaaaaatcgcttcatcaacttgtggtaatgatgataatactaatcgattggagagtgtttggcgttggtcggcggatagatgattgatcagcttatattgttccttatgaccgagtgtatgaagcttttgggtcaaatcggtatcagaaaccagcaatcttgagatgacaccgcccatgctatgcccaattaaaaccgcattatgactggctttgtcttgtccattggggtcaagcttggcaaaagtatgacggattaattcatgaatttgatagcggttttctaaaatgggcaggttagttgcataggcaacttgccatacttgatagttttcattaagcttagaatcggtcagtagggtattggtaagattcacccaagtggcagggcttgatgccaaaccatgcagcataatgatgactttttggtcaggattatacggttttagcataaatagttcaggtaaagcgatggcatcagaacgagaaatcatattcgtcagcgagacttgtcttagctgattttcagccaaccacaacgcatagcccgctgaaaaattcgctgtcaaaggatatgatgtatcgccgattttgacatgagtgttattgcttggattaaaaaaataggcataaaactcatgtgatgacagtacctcatcaatggtattgcccgtaggtttcatgatggcggtcagctgaatgtgcccgacatgatgaatgcgatcgtctaaggccttattgcgtgcaagctttttgagattatcaatactggtggtgtgccgatcattgatagcaccaacgaaactgacaccaagccctgagcgtcgtgcattgacatccaaatccagcaatctagaatcataagcagaaatcatctcagaaaacagctcgctgctgtgttcgtgttgtttgagcttacttgtcaaaaaatcacgatcaccaacagagatatgcagtgtattttgaccgtggtcattgctgagaacacgaccaattcttagctgattgtagataggttctaattgctcagatgataccacatcctgaaatttggcattataaaacgcaccatgatctttgcgataaatttgagtgattaaatcattgatggcaaggtgataaagatcaagcgttcggatatcagactcttggggaagagatgagggagtaccatgaccgcctaagctgtaataaaataaataagcatagctatatttgacagtttgataaagtgcatctcgatacttggcatgacactcattgcgagctttttgctgattttcagcgatgtctttactgatgggtgcattggtataataaggatcaatgggcggcctggcaagttcgatgcgacacgcctcttgggcgatgagattgtcagcatatgtataatacaactcactaaatacagacagttgtaaacgattgggcatttcgatgaaaaaaattgatctaacatcatcaacacacgcttcaaaatccgccatgcaactttcttgggtataacctgccgaaactaaaatagattgtgtcgctgcactgacacgaccgtttgtaatgatactgcttcttgttttttcaagtaatttggcaggtgtctgtttgggcggtataagcgtatgacaagcgctcaaaatcatcattaagctggcaggcaacaaaagcttacctaagcgtaatttacttggttttattgataaagtctgcatggatttctctggtgaagcgtatggcggttcgtcagggtttaaatcagctacaatcagccaagatttatcataataaaaaaaatccgtacaatcaagagactgtacggaagataatagacttaccaacgcattatttgatgggcttgacatgaatgtcatcatctttgatattccaaatgtaataaccaccgttgtcaacaatacgaatttgttcagcaatttgggcgtgatttgggtgtttgttagtcaaagtacgcaagcgtttgagtgccgctgtgcgattgtcatttagcaaatctgcttgagcgatgctttgttcagcctcaacattgcccattgaaactgccttatctaaatatttacgaccttctttaaaaccacctgattcagacagcataatcccaaatagcagattggcttcaaggtcatttggttttaattgtaaggctttttgcatgtatgtgcctgcacgaactgtataggttgtaccaagattaagatttcttgcgataccgtttaatttagcggcacgaatgacaacatcaaatgacgcatcaggcgtgctggcataagattcaatccaatctgacagatgtttgatattttccgtcgtgatatattcagcggtacgatttgggaaattggttggataatggcgagcatttggggcgatatcatccaaaaactcatcaaccaaagtaacatctaaaatgacggtgcctgtggtattggcggcaatggtaacagttgggatatttttgatttctgtgattaaaatattgggtgcaggcagaccttgcacgatggtttgtagtaaatcagcagtgccagcacgagccgtgatggtttcggtgatttcaccacgcatagttgggctttgataggtggtgttagcgatggcggtagaggcaaaaatggcagtaaaaactgataatgtcagtgctaattttttcataaaaaatccatgataatgatgactgaatgaataattgattagggtgtagtaacccttgataaaattttattgaaaattgataaaaattgacaattttggttcattttgtatgaaaatggctaaattttatgatttgatggcaatcgcctaaaattaccagtaaatacaatctaaaatcctaaaatttatcaaatcatatcaaattttatgctactttaaggtaacgatttacaaaaatttgcataaaatcttacccttttgttgcaaattgaaaatcaaggcaaaatcgccgtttcatccgtatggattggtaaagtgcgatcatatttttttaattttagacataaaaacagaccgaatatggcatttaatattgctgtgatggcaaacaactgagccaaactcagtttgatgactgccaaaataataattgagaaaattgcagaaataaccataaaaatggcatttaaaatattattcgccccaacaatgcgtgaacggtaatcaatgggtgcatatgcttgcatggcagtatatagtggtacaatatacacgccgccactaaatcccaataaaaacagtgcgataaataccggccaagcgtgcaactgatgtatgatatccatcacagcatacggccaaataggtaatgccaaagacagctgatttaaagaaaaatataacgccatcgcaaagactgacagacctaataatccataaggcagtaagcgaaagctgacttgatttttggtgagcgttttacacagtagtgagcctatggcaataccaacagaaaataagctcagcaaaaagatgaccacagattcatctgcgtgtaataaaaccttggtgacttcaggtgtttgcgtcaaaaaagttgcaccataaaaccaaaaccaactattacctaaagtgataaaaaacaataagggcagatgatacaggtacttgagtagttcaaagctcgtaccagcaatattccaattgatggataaatcaggtgcatgaactttagtttttgggatttggcgtgctgataaataaccaagtattgccacaacgatggttaccgtagccagccaatattcagagaaatatagctgtgttaagatgcctgccgtcatcatgcctgttaaaatggcaaggctggtgctggtttgaaataatccattggctgcaaccagctcatcatgacgcatggtttcgggtaaataagcatatttaataggaccaaaaaaagtcgattgagtacccatcataaataagcaaaaaaacagtaggctgtatatttcataaataaaacccacagcagcgaccgccatgatgatgatttcaagtaatttgatatacccagttaaggcagatttttcgtatttatcggcaatctgacctgccaatgctgagaataaaaaataaggcaagataaataataacgctgccaaattatttaataagcttacctcggtttcaagttttgctgctgctgaataggtgagtactaatatcaatgcttgcttaaaaatgttatcgttaaatgccccaaaaaattgagtaaaaaacattgatgtaaatacttgacggcgaaataagtttaattggcttgccataatcgatcggtattttaagctaaagttggggtaaattttgggctttcatcatgtacaaactctgctataatagcaggaatttgattttttatcttgagtttttttgtatgtcaaagcccgttttgtttgcaaatcgcagttttatgcctgtcgcattggcggcttatttgcctttgatgacatcgcaagcattggcacaacaaaataaccctgcaaacatcatcaatcatgtacccgctcatgacaccgccatcaatcaagcaaaggcaggcaatccgcctgttttgctaacacctgagcagatacaagcacgccttaatgctgctggactgaatgctaagccccaatcacaagctttggatgttgtcaattttgatgatcaatcgccgatatctcgtatcggtgagcaatcaccccctttgggtttggatatgtcggtcatcgaagaaaccacaccgctaagcttggaggaattatttgctcaagaatctactgagatgggaatcaatccaaatgattatattccagaatatcaaggcgagcaacctaatagtgaggtggttgtaccaccgacattagaacctgaaaaaccaggtttgatcaagcgtctttatgcacgcctatttaatgatggtgtcaataaggtgcctaggcttaaggcaaaattttatcaatcatcgcaatcaggcgaaaccagtgcgattgggtcatcgcatcaaaaaacagagccttatgcaaatatcaaagcagcacttgaagacatcacccaagagtcagcgatggatttgaatggctctatcccacgcctaaggcaaactgctttggtggcagcgcgtgctgtcggttattatgatattgatttatcaatcataagaaatagcatcggagaggtggatgtcatcatccatgatttaggtgaacctgtttatattgattatcgagcggtggaggtacgaggtgaaggtgctgatgataaagcatttactaccgtggcggatgaggtgccattgctgatcggcgatgtctttcatcatggcaagtacgaaaccaaaaaaaatctcatcgaaaatgccagtgctgaacatggatattttgatgggcgttggctggatcgttcagttgatgtaattttgccagataataccgctgatgtcagcttaatttatgatacaggtacgcagtatcgctttgatgaggtggtattttttaccattgatcctaaaaccaatcaattgacaaccgatccagataagctgccagttaaacgagaattacttgagcagttactcaccgttaacatgggagaggcttacaatttacaggcggtgcgtgcactttcaaatgatttgattgccacacggtattttaatatggtgaataccgagattgtctttccagagcgtgaacagatccaaaacgaccaagtgagctttgagcagtcttcaagtagccgtactgaaccagcacaagttgatgaaagcacacttgaacctgtcattgaaaccgttgagctaacggatgggatattaatggatatttcgcccatcgaatttagtgcatctaatctgattcaagacaagctaaatttggtggctgccaaggctcgccatttatatgacatgcctgatgatagggtgcttgccatcaatcatgatgatggcgtaaatcgctctattttgggcagaatcagcgatgccgtatctgccgttgcacgtgctattttacctgatgaatctgaaaatgaggtaatagatttgcccgagcgtaccgcattggctaatcgcaagacccctgctgatgtctatcaaagtaaaaaagtgccgctatatgtctttgtggcgagtgataaaccacgagatggtcaaattggtttgggctggggatcggacacaggtacccgcctagtcacaaaatttgagcataatttgattaatcgtgatggctatcaagcaggcgctgagctaagactgtctgaggataaaaaaggggtcaagttatatgccaccaaaccgcttagccaccctctaaatgatcagctaagagcaactttgggttatcaacaagaagtttttggtcactctaccaatggttttgatttatccacacgcaccctagagcatgagattagccgcagtattatccaaaatggtggctggaatcgtacttattcattgcgttatcgtcttgataagcttaaaacccaagcaccccctgaaacatggcaggatttaccagtggattttgtcaatggtaagccaagccaagaggcgttattggcaggtgttgctgtgcataaaacggttgcagataatttggttaatccgatgcgtggctatcgtcagcgatattctttagaggttggctcaagcggtttggtatcggatgctaatatggctattgctcgagctggtattagtggcgtgtatagttttggggataatgcttatggcagcaatcgtgcccatcagatgactggtggcatacaagcaggatacatttggtcggataattttaatcatgtgccatatcgtttgcgtttttttgctggtggcgaccaaagtattcgtggatatgcacatgacagtttatcacctatatcagataagggttatctgacaggcggtcaagtattggcggttggtacagctgaatataattatgaatttatgaaagatttgcgtttggcggtttttggtgatattggtaatgcttatgataaaggctttactaatgataccaaaattggtgcaggtgtcggtgttcgctgggcatcacctgtcggtcaagttcgtgttgatgtggcaactggtgtcaaagaagagggcaatcccattaagctgcatttttttattggcacaccattttaattcagcttagtttattattttatttattttacgattttatatcgccgacagattggcgtgaattgataattttaaccatttgtgattaaatgacgcattggtaattagatgtctaaaggcggcacatgactcatcaggataattcaaaaaactcgtcatcggcagaaaatggggtttctgctggcgttgctgcaccgactaaaactcagcccaaaccaccaaacccacccaaaccacaatggctaatctatttaattcgcttaattgtcggagcaattattgccgctttattgttgttggcggtgttatttgccatgaccaacagcgagtcaggttcaaagtttttaatcgaaaaaattgcgttagaaactggcactaagcttaagtacagcgaaggctcaattcgccatggagtttgggtgcaagatgtcaaaatcgctcaaagtgaagatattaccatcaccattaatcgtgcctatgtacagcttgggtggcgagccttgtttgctcgccaagtgcatttggtcaatcctaagattgataaagtttatgtgacaaacaccaagccatcaacaggcgaaccctttgattatgcgaccatcaacctaccagtgacgcttaagcttgaaaatgccaaagtcaatgaaattatctatgaccaagtggattctgagcctgtcgtactgcatcatatcgcatttgatcacgcatcatgggcagattcaacagttaaaattgataacgccatgctaagctatggtgatgatattaatatcagccatgccactggtggaattgatttaacaggtcattatccgctgtcgttgtcggcagatgtgcatattttggcacttgatgatgcgtattttgatactttgtcggtgaaagcaggcggtagccttaagcgtaccgttggtacactcactggcaaatataatcagcatcatgtgacaggcagctttatcgctcaagggttggataaaaactcaccttttagcgcacgccttgattttgatgaagtacgattgccttatgctgacagtcaaaatattttactaaaaaatggctctatcatcgctgatggcgtcatctcaaatatcgagctacgcattaacactgagttatccgccaaagatattcctgatgggcattatcacggtcgtggaattattcgtggcagtaccatgcaaatcccatatttgcaggctgatactgccaatggtactttggtggcaacgggtgatatgacttgggaagatggctatgagcttgatgccaccattacagcagacggctatcgtatccgtgaagagatgccaagtgattatcatgaatatagagcctatctacctaaggttttgacaggctcacttggggttaagtatacgctattagacaaagccagtcatgatactcggtttgagtttgatctgaatcaaaaagacggtgaacgcattcaagcgacgctggctcaaaatcaacagagtgatcatgagccttggcgtattgatgcgacttgggcaaatctaatccgccatgatattccacaaattggcgagattcatagccgctcaggtcaggcatcagttcgtttggagaacggacatacctatattaacgcctctgctgacattgttaaacttaatgccgtcccaagcggatcatatcatgtgcaagcaaatattgagcaaaatcagcacttgcacttgacagattttaactatcaaggtgtgatgggcgagttgacaggtactggcagggttgattttgcgactgcccaaagaccgcttgagtggcagcttgatgtcactgccaatccagtcaaacccaatgcgtattttcaaacacccaatcaaacaccgtttgagcaaatttcaggcagaataattgcttcagggcgtctgcgtgagatagatggtgtgtcaattcatgacattaaagtggatgacagtgatttaaccgctttattaaatgacggcaagcaagtacatctgatgggtcaaggcgtcagcaagattaggctacaagatggacaaattagccatcttaaggcaaattttgatggcaagcttgctcaagatatcttaccgcaggtagctgactcaagcattggattggatattgaaggtgatttgaatgatttgaccatcacacgggcagtcatgatgaatgactcaggcaaagtatcgcttgcaggtcgtcttggattaaatgacggtattcattggcaaattcaagggcgattagatgaggtggataccgccgcttttgttgatgatgacaatttagttgcgatcatcacaggcgatcttgccacatcaggcagatatcgtgatggcgtgatggatgatatcgcactcacttttgatggtcaagtgattaacaattcaatcccaaatggtcatctaagtattgatgcgacaggttctggcaatcgctttatggtcaatcatctaagacatgatggcacagcaggcacgctgaatgcgacaggctgggtagatattagccaaggtgctgcatggcagctagaggctgatatgaattcattgaatttgggtgcatttatccagtcgctagatactgacttaaacggtacaattcagcttgcaggcaactggcaagagtctcatcaagtcattgatatcagtaatttggatattacaggtagctacaataatcagccacttatcgccacaggcagcttatatgccaagctttccctacctaaagatttggctgggtatatccaaagtatcaagcaagcaagccgcccaccgacttcgtctgatgatttattggcactaaaaaatcgtattgataacaacgcacgccaaacccaaaatatcgttcataaactcaatgctgataatctacaagtccgcattggcaataatcatttggccatatcaggcgatgaaagacagttgaccgccagtgtgaatgtgattgatcttgggcagctgattgataccgcaagtggtgcgattcaaggcggtgtgattgtcgtcaatgatcatcacgctttgccaactttatatattgatgccagtgtctcatcactcagatttgccaatatcaccatccaaaacgcccaagctatcggtaaaattgtcaatctgggtaatagcgaaagccagctgttggttcagggtgatgatattatcgtgatgggacgcaccattaaatctgctcggatggattttagtggcacagaagccgatcatatcttatcaatttcaaccaaaagcggtgatatcgaagcatctatgcatattgatggggcatttaatcgcaacaatatgcgatatcatggtgttttgtctgatggttttgtcaagagtggatttggcaaaatgtcacagcgtcagccgaccgagtttagctatggattggatgataatagcttacaaattgcagcgcattgttggcaatcggcacatatccaaggcgatggcgtgggtgcgatttgtttacaagatacattaagttatacaccgcaatcagggaatgtcaatcttattatccaaaatcttgatactcaagtactattggcggctctacccagtgatattcattggaaatccatgctcaatggtcgcattaaggcaatgtggcaggcaggtcaatcacctttggttgatgctgtactgtattctgatgatggtacaattggcttaactcaagaagagacaggttatattgagatgccatatcagcgtgcgtctgtgattgccaaaagtgttgataatggcttaaaggtaagaaccgatatcttgggtacggcaggtcgtggttatgccgatgtaatcatcaaccccaagcaaacagacaagcccatttctggtgcgcttgttatgaatgatcttaatttggcggtattgcgaccatttttcccgagcattcaaacattgagcggtaaagtcagcttggcaggtggcttaggtggtacattatccaaaccattgttttatggtaatgccaatttaaagaatggtgcattagcgattgttggcgtaccaatgcccatttctgatgttgatgccacggtgaacatacgaggtactaaagcacgcttagacggtagatttatgggtggtgagggtcatggtgtgctttatggtgaaatggattgggcagaagagctgtatgctcgccttggcgtatttggtgaaaatctgaccgtcagccagccaccgcttgtgacggcacaaatcagccctgagctggaagtgattatcagacctttccaaaaatttgtagatgttcaaggcgttgttagtatcccatcagcaaccattcgtccgccagaggcaaccgcagatatcgtaaccgaatccccagatgtatcagtcattgaccgccgtatcacaggtaatattgaccagattttaagtagagcgaaaccttgggatattaatgcaaatatcggtgttgatttgggtaatgagattgaatttcgtggatttggggcggtattaccattggcaggcgcgatacatttgactcagtcaggacaaggtgcaatgcaagctcttggcgtggttcaggtttctaaacgcacaaaaatcgatgtcatcggtcaaaatttggatttaaattatgcccaaattcgttttgatggcgacatgcttaatccacgcttatctattgagggtgaaaaacaaattgaagggcaaacggtgggcgttcgcattcgtggaacggcatcaaatccaaacattaccgtatttaatgatgcaggtttggatgaataccaagcaatgaatgcactggtgacaggacgcattagcgaatcaagtgatttgggtatcacagagcagggttttcgctcacaagtaaccaatcaccttgctgctgctggcttaagcttaggtttgtcaggaaccagagatttaaccaaccaaattggtcacgcatttggttttcagagtttgaccattgatgcctcgggcagctcagatgataccaatgttaatgttacaggctatattacaccagatttgtatttgcgttatggcgtgggtgtgtttaatgctgaatcaaccttatccatgcgttatcaattgacacgccgtgtttatattgaagcaaccagtgccgctgaaaatatggttgatgtgatttatcgttggaagttttagccaaaaaaccattcataaatgcgtttgaatgtgtatcagatgatgaataaaaaggcattgatcagaagttttatccatgccaaatgtttgatgaaattgattttaatctgtatgtcattttaacaaagtaattgtcagcatttttagaccgattgataccttaaaaacccaacaagcatcatctgtcagtacaaatgatgcctgttgggttggagaaaaacggtttttattaaagtgatttaagatattaaactgatctaaaatcaatatgatacattatgttaataatttcatgttaatatcttgataatagctaatgtcgccaatggatcattagataattatgagataattacttggtcaaaattaatcgattatttcgagttaaacgcaggcggtactcttccccttgatgttcaatacgcacttccttggtcatggcaaaaagattttgtgagtataatgttggtaagcgaatgtgatcacggttactaaaataacgagcgatactcatagtcatggcgattttccttgtgttgacgggtgatgggtggttatcccaagccgtatgctaaactactatcttactaaagtgcactctgattcaaatatattttgagtgctggcatgattgccattaaaatgatccattaccgttttatcattaggttaattttcgaatgatattggtttttaaacagcaataattatcatttgtagttataatagcaggtttttagtaaattg

SEQ ID NO: 35 - DNA, 96109 bp, Moraxella catarrhalis
atctatcttagatgctgttccaatcggccgtgtggctcaacctgaagaaattgcagcatctgtatcatttttagccagtgatgatgccagctatattacaggtgcagtattggcagttaatggtggcatgtacatgtaaatgtgatgattttgacaaggattgattcattgacaaaagtcttaatttgccactatcataataaaaagtgaacatatgtattcataaatacttgcactttttcaataaatacattatgatatttattaagttttatccaaacctacggtagcatggtgctacagggttaatcattataaaggaaattaccatgagtgatatcgaagctaaagtaaaagacgcagtcgcagaacagcttggtttaagtgttgacgaaatcaaaaacgaggcatcttttatggatgacttgggtgctgattctttggatttggttgagttggttatggcatttgaaagcagctttggcatcaccattcctgatgaagattcagcggaactgacgacggttcaaaaagccatcgactatgtttctgacaaagttgcttaaatcaactggcttggtctgacagcttatctcctaaggtcatctcgttttgaggtgacttttttatggcagaaaatatttggtaggctaattctacacattgtaacgcttttactgtcaaatttcactatgcattatcttggctttggcttaggataactttagcacaaattgtgctatctgattaaatcaaaaattcataattaaggagaatgtaatgggtgtttttagctttgcaaaagatattggtgacaaattatttcatcgtaataaaaaacaagacgcagcccaaccaaccgctgctccagctgcaacacctgcagaagagccaaccgctcaagagattgccaatttacttcttgctcgtattcaagctcaaaatgtcaatatcagtggcttaaaagtcaattataatggcgatacagacacagtcacattatcgggtgttgccaaaacgcaagccgaccgtgaaagagcacgccttgcggtgggtaatgtccagtatgttgagacggtggttgacaatattgaggtggaatctgctgaacctgaatcacgattttataccgttaaatcaggtgatagcttatcaaaaattgccaaggaaatgtacggcaatgcgaatgattatatgaaaatctttgatgctaacaagcccatgctgtcagatcctaataagatttatccaggtcaagtattgcgtatcccacaataattgatcgtctgcgtgctatcattcaaagatttttaaataaagtaatatcttgatatcatatcgcatcatcataaaaaacccaagtactaaatcagtgcttgggttttttagtcattggataaccaattaatatatattttatgcactaatgagcatagactgagttgcgacaatgattgtcgatagcggtttgaatgtggtgaattttttgttggatccgatcgggtgtgagtttagtttgttgaccgttttcaccaatttcgtatatgacaccccctgatttcaaggtgttaaggttggttttaagataatggcaggcttgtgtattttgatgattttttgggacgctaaaataatgtactttgatggctgtggatggcttgccaatgggtgctatttggctaaaaactggctctccaaatacccccacactttgaaaaatcatggtgctgtgagcatcattgacgcagatacctagccctaaagcaacttggcacacggtatttttagctgtttttattaatttaccagtcatgacacaacaccaaatcatcaactggctgatattgtatcattcggttggtgctaaagacagtcattttatcgaattttagggcgagtaaagtggagggattggtaaacatggcaaagatataactgatttatttgataaatttttaaaaagtactaaaaacaggttggcaagatgaaagttttcaggtaagataagtggcattattttgatgacgctcatcggtcggtaattttgattggcgtcatctgaagtcggcgtagctatttatcaggtgctgcgtttgtgcatttggtgccattagattaccgtctgatgacgcacgactgtacattgcaataggacttaccagtctgcaagacgcaagaaatttccctttgttgttttggatttttccaagtcactttgttgtaagttcatctgcgtatggcagccgattgcctgatatgaatcaatccacgctcttcgtctgaatattgtcacgatgacaaaaggatgtaacttatgacgcaacaaactacccaatccccaaatatgacggggcatactcaaaccaaagatgctgctgcgcactttcgtgaactccaagatatcatcgcacgcggtgaaatagccatgatgtcaggcgctgagatgcttgttcaagcattgattgatgaaggtgtcgagtatatttttggctatccaggcggtgcggtattacatatttatgatgctttatttaagcaagataaaattgaacatattttggtgcgtcatgaacaagccgcagggcatatggccgatgcatacagtcgtacaacaggcaggacgggcgttgttttggcgacttcaggtccaggtgcaaccaacactgtaacagccattgcaactgcttatatggattcaatcccaatggttgtgttggcaggtcaggtaccatctagtttgattggtgatgatgcgtttcaagagtgtgatatggtcggcgtttcacgccccatcgttaagcacagttttcaagttcgccatgccgaagacattccaacaatcatcaaaaaagcattttatattgcaggctcgggtcgtcctggtcctgtcgtggttgatattccaaaagatatgaccaacccaagtgataaatttgcttatatcatgccaaagacagtcaatatcagatcatatcagcctaccaataaaggtcatggcggacaaatcaaaaaagccatcgaaacgctactatcagccaaacgccctgtactgtattcaggcggtggggtggtgcttggtaatgccagtaaagagctgcgtcaattagccgatacgctcaaactacctgttactaataccctaatgggactgggtgcttatccaggctcaggcgaacaatttgttggaatgcttggtatgcatggcacatatgaagcgaacatgaccatgcatcatgctgatgtgattttggcagtgggtgtgcgttttgatgaccgtgtgaccaataatgtcaaaaaattctgcccaaatgcaacgatcattcatattgatatcgatccagccagtatctcaaagacgattatggcacacattccgattgttggcgatgttaagctggtactaaatgaaatgcttgccttgctagcagagattgataagtgtatcgatgaacatgcgctcaatgattggtggcaacaaatcaatgaatggcgtaaacgccatggtcttcgctatgatgcagatgatatgactgccaaaacacatgccatcaagccccagcatgtggttgagatgctttataagctgacgaatggtgaagcaatcattacctccgatgttggtcagcatcagatgtttgctgcattgtattataagtatgatgagccacgccaatggttaaactcaggtggcttaggtacaatgggcgttggtttaccttatgctatggcagcaaaattagctcacccaaaaaagacagttgtttgtatcactggcgaaggctcaatccaaatgaacatccaagagctgtcaacttgtctacagtataatctaccagttaaaattttaaatttaaataatgctcagcttggcatggttaagcagtggcaggatatgctttatgaaggtcgccatgctcaatcttatatgcaatctttacctgattttgttaaattggcagaaagttatgggcataaaggtgtaaaaattaccaatcctgctaccatgcaagaagagctaaaacaagccctagaaatggatggtttggtatttattgatgtctatgtggataaaggtgaacatgtttatccgatgcaagtcgctggccaatcaatgcgtgatatgtggttatcaaaaggggagcgtacctaatgccaaatcaagtacataaacatctgatttctgtattaatggaaaacgaagcaggttcgctgtctcgtgttgtcggtttattttctcagcgtggctataatattgatacgctcaatgtagcagccacggatgacccaacgatctcacggctgactttgacaaccattacaacacatgacaaaatcgaacaaatcaccaagcagctgcataaactgatcgaggtggttaaagtccaaaatctgtccgagctgtcaggcggtcatcatgttgaacgagagttgatgctcattaaggtgcgtgcaacgggttcaaaccgtgaagaaatcaagcgtaatgccgatatatttcgtgcccaaatagtcgatgtcagcacaaacttgtatacaattttaattactggtgatgctggcaaattggatggttttatcgatgtgattggtcgtgaccgtatcctagaagtggtacgctcaggtgtgattggtatcgctcgtggtgagaaaactttggcgatttaatcctatcaaccatgttttaggcagtttattagtttacaaaaaatgtattttataaaatgaattgactgccatgaacaatacagtgattaattagcgatcattaattaaccataaacgaattattttaaccctgccaattttggcaaatttttaaggaaactttatgagcctaaatatttattatgacaaagattgtgatttatcaatcatccaaagcaaaaaagtcgccatcattggctacggttctcaaggtcatgcacacgcattaaacctaaaagatagcggtgtggatgtgactgttggtttgcgtcaaggttctgcttcatggaaaaaggctgaaaattctggtcttaaagtggctgaaaccagcgaagcggttgcaggtgctgatgtggtgatgattttgacgccagatgagtttcagcgtgaactttataaagaggtgattgagccaaatatcaaacaaggtgcaactttggcttttgcacatggctttgctattcattacaaccaagttgagccacgcgctgacttagatgtcatcatggttgcaccaaaagcaccaggtcatacggttcgttctgaatttaccaaaggcggcggcattcctgatttgatcgccatttggcgtgatgcatcaggtggggcaaagcagcttgcactatcttatgcagcaggtgtgggcggtggtcgctctggcatcatcgaaaccacttttaaagatgaaaccgaaacagatctatttggtgagcaagcggtactttgtggcggtgcagttgagcttgtcaaaatgggctttgagactttggttgaggcaggctatgcacctgagatggcatattttgagtgcttgcatgagctaaaactcatcgttgatttgatgtatgaaggtggcatcgctgacatgaactactcaatcagtaacaacgctgaatatggtgaatatgtgactggtcctgaggtcatcaatgagcaatctcgtgccgccatgcgtcatgcgttaaagcgtatccaagatggtgaatatgctaagatgtttatcgctgaaggtcaaaccaattatccatctatgaccgctcgccgtcgtaataatgctgcacatcctatcgaaacaacaggcgaaaaattgcgtgcaatgatgccttggattggtggcaataagattattgataaacaaaagaactgattaatttgaatcaatgtctaaaacagctgccaaattggtggctgtttttttgaaattattcaatgaaaccgttataatgaatgctattttgatattgataagtcttttatgcctgatttttctttagaagttgtatttattgcactaagtttgatgatcgccatctttgtgatgattgaatcaacattgcttgagcgtaacggtggcaagctgctgcttaaaaatagtatatttatgttcatcagtctatcaacctcggcatggatggtggcagcgtgtttggcttggtattttttggatcttgtcggtttgggcttggtggtagcgatggtgtatccgctgtatgggcttttgggtttggcatattcggcaatgttgatgcgtggcattgaggttgatgatcctgccgaagtggcattacccaaaaaatacttaagcttttgcaaatcctttggtttggtctatagcatcttatgtttgactgccttacttgaaagcatgggcttaattcaaatttaatttgattaaatgatggattgagcttggattgccgtgatttttgatggcgattactttattagtcatcaatgatgaaaaataattcccttttttaataaaatttgttataatagttttcatggtatttatgtacccaaagctggctgatactggccactttcccaactgcagatagacgcagtggtatcaagcattctttaggcaagaccagtaagtttcttatttggaagattgaatgaagatggggcaacccgcctgttatcccgatcgtttttgtatgttttattgcatgaatagcataagttgcgtttttacgcttttcattcatccaaattaggaaaattgttatgtcacaaaaagttcttggcactgtaaaatggttcaacgaatcaaaaggttttggttttatcgctcaagataatggtggtcaagatgtatttgcacattatagtgccattacaggctcaggatttaaaactttggcagaaggtcaaaaagttgctttcatcttaggcgaaggcaaaaaaggcccacaagctgaagaaatcgaaaaagtttaagtcattgatttgatcaaaataccacctttatatagttaaggtggtatttttatgctgatcagtttttgctatcatcatctgcattattgattttggaggtgtaagatggatttgtttagatgccttcaaattaacgatttttgagcctaagcagtgattcttcgtccaaccgccagcgacccttttttttgttaccagtacggttgcccagcgtacttacaccaaataatttatgcattgagtgtgatgaatgggcatggcagatggcacacgccaaaccatcggcggcatcagcttgtgggataatatccaatgataaaatacgacagaccatggcagtgacttgctctttatcggcagcaccgtagccacagacagcctgcttgatttgacgagcggtgtattcactgacttgtaaatcttgagctgtcaaagcggcgatggcggcgccacgagcttgtccaagctttagggcagagtcaggattatttgccataaacacttgctcaatggcagcttgtatgggtttattgctgtatttttgataatgattaacaatccgagaaactccagcaaaaatctgagcaatgcgttcggtgatgtcgctactgtttgtacggatggtgccagcatctaaaaaggttaattgatcattatttgtactgataataccataacctgtcaagcgtgaaccagggtcaatgccaataataagtgtcatacaatgattaccaaaaaattatcatcaaaattattactaaaaatactaaacaataaaaaatacttgaaaacttgccaaatgtcctaatttattgatattatagcgtattttatttatatattttcatttatttattagatttaaaggagataggcgtgggtgcattggtgggtattgccctgatttggtttgtcattgaaatgctgctttggtatttggtggcacaatttatcagtggttggtatgtgtttttttggttcatcatcgcagcaatcattggaattatgatgattaaaaaagctgcaaaatcgcttaatccaatggcacagcaaatgaaagccatgcagcgtggtgtgatacccaatccgagtaatcaacctgctgagtcaacactggttaaatccatcgccatgggcgtggcggggctgttgttgttacttccaggtcttttaacggatgttgcagctttggtattattagtgccatttatccaaaccagactgaccgccgccgccaaaaattatgccgtcaaaaatcaagataaaatgatgcagatgatggcgagtcaaatgggtggtaaaaacccttttgggggcatgggtcaaaacccttttgctcaaggtggtatgaagtcaaatccttttggtaagcatggcggctttggaacaacggttgatggggaagctaaaactgttgataaacaagtcaagcgtattcgctctgccaatgatgaataatttgatagccctttttttggggctatatgattttatagggtgcgaatccgagtttgggctatgacttttttgctatgaatttcaagataccaaagtagtagcactgccgccacgccgagcgaaactaccaaggtagtccaaaatccataaatccccataccgccatgaaatgccataaaataccctggaattaagccacatccccaaaatgcaatgatatgaatcaccatcggaatggtggtgactttataaccacgcaaagcatagcttgcaacacattgtatggcatcgcccaattgaaaagcagcggcatataaaataacactgcctgcaatgccaatcaccgccatatcatcggtatacatgctcaccaaaggatagcgaaaagccaccaagaaaattgctgttacgatggatatgagtatggctgtggcaatagaaacgcctgaaatataacgagcacgattaaactcttcacaccctaagctgtaaccgacacgcacggtggtcgaaatccctaagctttggggaatgatgaaaattaaactggttaaactgatcgcaatctgttgggcagcgacataatcttctgtgttgccatttaacctagcgaccaaaaacataatacaagtaaatatactaacttcaataaaaaatgataagccaatgggtatgccaagccgagtaatctcatgcaggattttaacattaggcaggctaaacttatccattagcccaaaggcttgtagttgcttgtctttttggattaagatgaaaagaatgattgcatttagccaaaatacaattgcggttgccaagccacaacctgcaccgcccaatgctggcataccaaacttaccatagacaaaaatccaattcagtggaatattaatcaaaaaacatagccagctgacccacatgatgattttgggcttatttaggctagaagcataggcatgtaaagcacgatgtatcattgccgcaggcatggcaagaccaataaaccataaatactgcttggtgataataaaagtgctttcatcgatatccaaccaaagtccaaaaggtgtgatgctaagccacattaaaatcatgccaagcacacccataagtaccccataccaaagaccttgtcgccccatttcaccaatctcatgcgactttttggcaccaaatagttgtgcaatcatgggattgagcgaagtcatcacacccattaaggtgacataaacagtaataaaaacactgccgcctagagccactgccgctaaatcacctttgcccgcaccgcctgccataatggtatcgatgaaacttgtacctacttgggcgatttgggcaagcagcatgggcgtacttaaatgaataagtgctgataattcttttttataagtacgatattcaaagcgggtgatatctaatagcatacaaataggtcataaaataagttggctcgggtataaaaccaagtgataaacagtgagcgggcttaattgggagatatggtacaagcagatggatagataccaatcaatcacacaatcctataaaaacggtcatgttaatcaacaatcaaagataggtaaattaagttaagatggtctaatatttatcgttgagacgctgtgcatgaatctcaaggctttctttatctactcttaaaataaaaccaatcataatcaaaagcacaaccatggatgagccaccaaaactaaaaaatggcatggttaagcctttggtgggtgcaagtcccatggtcataccagcattgatgatgacctgaccaaatataaccaccgcaaaaccaaaaatggtataacttaagcgaagttgtcggcattttaatgctcttaggctaatgaccataatgctaagaataatcagcatctccaaaaataaaactgttgccacacccaaaaagccaagttcctctcctgtgatggcaagcagaaaatcagtgtgtgcttcgggtaggtgtgataatttttggacactatccccataaccaatgccgcttaattgcccacgaccataagcgatcaaactgcgtgccagctgaaaatctgaaccttgaatatcatcaaaagcatcggtaaaagataaaattcgttcacggcggtaaggctcaagccaagctgcaatgcctcctaaaacgattgccatgaataaaatccaagcgtactgtagtgcaggcgcaccactgacaaagatgatgacaatcaaagtggcaaatagtaccaagacagtaccaaaatctggttgaaatagcaacagtccgcccactggtaaataccatgccaatagacgcacccctgtaaaaacattgctccgtagctctgcagatcgacgcacgacataatctgctgttacaaacaccatgacagctttggcaacttcaccagcttgtagattaaatatcccaaggtcaagccatcgccgcgatccattaatcacatcaccaaacattgctgtaagtatgagtagccccaaagcggttacccacatcaaaaataccacattgatatgcgttcgttgataataaactctcaaaggaatgcgataaacaatcattgcaatcatagtaccgatgacgacatatgccaactgataccaaaaaaacctcagtgatgccaaatcgcgagcagcagaaaatggaatggatgctgatgcaatcatcaaaaggctgatacagatgatcaagctcaaactggtaagcaataccgttcgtggattgagcttatcaaaaaaaccaagaaatttatcggagaattgggacatgagtgctgctgtgagttggttttgtataaactgtttattataacggattttcgaattaaaaatgtggaaatttcaagtgatttggtcaggttaatctgttgggcaatctgcttgacaaaagcggtgcttacaatttatgtacctaatcaagcagggcgtttgcatggatgggctaaatgggtgcatgggctaaagcgtgaaccatgttaacaaacttatcacctcgctcattataatttttaaattgatccatgctagcacaagcaggtgacaaaagcacagccctagcggtgctttgactggctgccaatactgcccgatcaagtgtaccaacctgatatattttagatgccaaatgtgcatcacctttgagtaaatcttgctcaattatcggggcatcttgaccgattaaatacacactatccacccactgcataacatatgctgacagctcactaaaatcttgacctttaccaagcccacccaaaatcaatgccagtgatgatatgccataaaccgtgccaagcccatcaattgctgcaatggttgagccgatgtttgtaccttttgaatcattaaaatatgccttgctatcaatatcatcaatatattcacagcgatgcggtagccctttgaaagtcttaagggtatcaagcatggcatccatgggaagattggcagctgtgcctaaggcaagtgcagataaggcattgagtaggttatgcttgcctttgatttttaattgatggattggtaaaagtttgtttttttgatgatataatgccataccatcaccatcatcaaataaataaaaatctgccgtttggtggctaagtaagctatttgttgtgataatggtgtgatttggggcaacgcttgtcagtgtggtcaagcattgcttggctaaattggcatcgtcttggtagatgatggcggtttggcaattttcaaaaatacgcaatttttgtgccaaataatccaccatgccatcgtgccgatcaagatgatcagcggagagatttaaaattgttgccccttgagctgccaaatttgagatatgctcaagctgaaaacttgacagctcaagcaccaccaaatccatattttggatcgttaataattcaagtgcaggcgtgccaatattaccgccgacaccaacaatcatgcctgcatgttttgccatctcgcctactaatgtcgtaacagtgcttttggcatttgagcctgtgatggcgatgattggtgtgtttgttgcttgagttagatctcgtgctttgagtgtatcaatgaacaattgaacatcgctgatcacaggaatgccttgagctttggcggcgacaatactcggcgttcttgggttaatgccggggctgatgatgatctgatcggctgagcttaagagttcactgtccaagctgccaaaatgacaatgaacgcctgtgggcagtttatctgccaaggtaggattgggattaccatcgatgatgctaactttgtgaccgtgattgaccaaaaaattcacagctgacagtccagagctgcccaaaccgacgacggcatatttttttgacataatattttctcacaataataatcacgacctatgagctattttaacaggtattggcactaagtggtagcaggttcgtgtgctatattagctgatatcaaagcggtgaattgttacaaaatgatgttgtgaattattgccttgccttatataataattttattatgattaatatacactgccaaccgccaaggaatatttatgaaactgatttctgcaattatcaagccgtttaaactcgatgatgtgcgagaagcactctcagaaattggcgtcaatggtatcaccgtcactgaagtcaaaggctttggtcgccaaaaaggtcataccgagatgtatcgtggggcggaatatgtggttgattttttaccaaaaattaaaattgagatagcatgtcgtgatgagatggttgattcaattattgagtcaatcattaaagttgcaaatacaggtaaaattggtgatggtaagatttttgttagtccgcttgagcgtgtcattcgcattcgaactggcgaatttgatgaaagtgccttataaggcaaagtctgtattggagccgatgaccaatcgctgatttagcttatcgctgatttagtttaaagccaaaaaaagcacttgattgacattcagtgcttttttattggtttttgctaccaaatggcgtgattattgtcttacacctgtttgggtgccagcgatgcttttaatggtgatagtgttaccattcacagtaatattaacagtgcctttgatgggcagagtaggatgagcacctttgcctttatatttaccctcaccttggcttgagatatttgtcaatacgatggtaccttcacgctttttggctttatcggttaagccttgtgtcatcacaccttgatagccgttgccagcttgactgatggtaatgatggctttttcttcacctttttcgctcatcttccacttaccaacaatggcatcattggcaaatgctgagactgacaataaaacgcctgcacctaaggtgaataatttggtagatagcttcatataagctccttttatgtattgatccgtattggaaatactttggtatgatagatcggctttggtgatataaatgtgaattggtcactcatttttattatagcgaagcttaagaccatttgtaaatacttagtatgaaatttttatcatgatttggcaaggtgatcgttttgttgtgagcattggggcgacactttcaatgttaagcaaaagcaatgttaagcaaaaggattatcaatctgctcagatggtaacatatcatgagcctttatttcatctaaaggttcatttttaagtgccgctaccaaccgattagcaaaatcttgtaaagccatcgcttgagttagaccgtcttgacatttagtgatagaaagttcaccgaagatttgcacaacatcaaaatgattctcgatggtcagatctccaatggtcagcgcttgctcatcattttcaaaaggatgtatcatggtatattcctcaatgatttttgttttatcaagtacggtttagtgtttcaaagacataacgcatggcactgatgaccaaatcaaaccagctgcttggctgatgatcaagcaccttttgttctgggtttttattgctgctaggtctgggcaaatcgtaggcagtttggcgaatctgagtaggtagtgatggcatggcattgatacccgtcaggcgagccagctcatctaggctgatgatttgataattttcactactgtcatttgaggaaaaatagacaccagcagccgataattttggaatatataccgccttaaaaaaatgactgggtacaagcactcgtccgccaatacgctcagaagtcttacccaaaaaagcaacgcccgtcacgacataaacctccccatactcgattgccagttgacgagtctgtgtttcgatatgacgccacagatgacggttatgttcaccgttttgaggtgcgatattggctaggctaaagctatcatattgggattcggtggtggccatatcgccatttggggcgatatgaccacgatcatagcctgagcgtcgatagtcagacagctcagcacgctcatcagcaggtagtctggactctgcgtgaaagctgtcaacacgcgccaaggttcgggcttggctgatgcgtgcttgggtcagatgagatgctgaccatagcggtgtgcgagcgatgcctgaatgtaaagtggcaaatccttcaaagcataaagcacgcgccatggtagacagccgttcaccttgcttgccgatcagggttggtgcttgccgattggcaaactgattttgacagttgctaaagctatcatcaaatgaacgtacaccaacaatctcaccatcagcttgttggtcgtggtcttgatataaacggtcattgtctgtgcttttgacgattgtttgcttaatggctgtggtgatgtgagttgtcagctgttctgctgaattgatggcactgtcgttggcatgggcagtactggttgcactcatcataataacgagcaaccaagctgatatttgctttgggtgtttaaaatgaatcatagctttggggcatcataactgtgagcggatattgtcattgtaattcattgataaggtttttataatgtccctttggattttagcagttttttgagatgacaacaaccaaaatgacagatgtttgtacgatagctcagatgagtgagcagggcgtttatccgtctgatgagcagcggcacagttttgccaagcggttactgacatggtttgagttacatggtcgccatggactgccttggcaataccatcatcagccgtcagcagatatttatgctgtgtgggtatctgagattatgctacagcaaacacaagttgtgacagtgctgaaattttttgagccgtttttggcacgatttgcaaccgtacaagagcttgctgtagcagattggcaagaagtagcgtctttttgggcagggcttgggtattatgctcgggcaagaaatttacacgcaggcgcacagcaagtggctgattttattgatactcatggcaggtttcctgaaacggtcaatgagtggcaagcagtcaaaggggtggggcgatcgacagctggcgcaatcgttgcgatgggcgttaagaagtttggcgtcatctgcgatggcaatgtcaagcgtgtacttgctcgccatcgcgcggtttttggtgatgtgacaaaaagcgcaactgacaaaaggctttgggaaattgccaccgcactaaccccgaaagagtatagtggacactatgcccaagcgatgatggatttgggtgcaacaatttgtacacgaactcagccaaaatgccatctttgccctgtgacagacgattgtattgcttatgtgttgggcgttcaaagtcagttacctgtcaagaaaaaagcaccgcccaaacctcattggcacagtattgcattatccctgacacattgcgggctgactttatggttgcaccgacaaaacggcggcggtatttgggatgggctttggagtttaccgatttttatgttgcctttggatgataatcaaaagcttgacaataacaccttaagtcatgccattttcaaggcgtggcaaagtgatgaaaaggtgcatgatttactacacagccagctcattgagattttgcccatgcccacccaaacctcaacagcctatttacgccatacactcacgcatgttcattggcatctttatggcatgtcaatttgtcttaataatagtcaatttaaccaaattaatcaaacgcttactgctttgggcattgactatttatggaaggatacgccctataatttaccgttgcctgccgccatgcataagcttttgacgcttagcaatagctctgcctaagcggctgattttgagctgtagcaattaagcatcaaaattttcttgtttggagccaatctgtgatttgaagcagtaggttgttatcaccccaatatttaacctgtgatctggcttcctcaaacagttgattggcgtactcttgagcaccttttacgccaagcaatttgacataagtagatttttcaagtttttcatcactgccagctggcttgcctaaagttatcgtatcggcggtgatatccagcacatcatcttgcacctgaaaagccaatccgattgcacgagcataatgcttaagataacctaaagtatcagtctgcacatctgcacaaatcgcacccatcatcactgccgcttcgatgagtgcgcctgttttatcacgatggatggcttctagcttgtcttgagagagcatttgattttcccctttgatgtcaagcatttgccctgataccatacgccgtgctcggcaacttaagagtttggctaatttatatgcaatggcatcatcggctgaatttttgtcgtaacactcaaataatacttcaaaagcgatggactgaagtgcatcgcctgcaagtagggcgacatcttcaccatacacaatatgacaagtcggttgcccacggcgtaacgcatcatcatccatacaaggcaaatcatcatgaatcaaagaatagctgtgaatcagctcaactgccatcatggcacgaaataacatttgtatttttttggtcaaatcatctgtttgatgacctgttttaatgagcgttaaaaaagttgataataccaaaagtgggcgtacacgcttgccaccgttactcatcgcatagcggcaagctttgtttaatggttcaggcaggcttgagtgcgttaggataatgtctaataggtttggtaggtttttgctttgccactgccttacctgatcaagatgattggcattttgaataaaggcggtgatgtgatgcgtacttaaatcaaagatgaaatgattggacatggtatttagatattttatgataaatgggtcattgataaatgctttatcataccttaaattgttaaattttggcatgattctgatggaaaagttgaatgaaaaatcttaaaattggataaaaatgctttatttttaagaaaaatccgttattttcatgaaaaatacttgaccgttgccactttttttggtttaatacgcccactttggcgtgatagctcagtcggtagagcaacggattgaaaatccgtgtgtcggcagttcgatcctgcctctcgccaccatcattaaaaaagcctttcgatgactcgaaaggcttttttaatgcgataagacagtttagggattgtgggttgagtggctattgataaaatcagtgatttgattggctaaaatttcccaaagtttttcttgagcggcaagactgccccaagcgttatgcggtgtaaacagtacgcgtggatgatcagcgataccaagcagcgggtcatttttggcaaatggctcagactcaaatacatcagaggcataacctaagatgtgatcattgatgagtgcatcaacaatgtccgctccacatactacgccaccacgagcgacattgataattagtggtttttggtgcattttggtgagcgtgtcggtattgattaggtgcttggtggcgtcagttaatgggcaatgtaaactgatgacattgctactgtttagcacagtttcaaactcggtatattctgaactacgcggggttttgccttgatgttcggcgtataaaacatgcatgccaaaagcttttgccaattcacccacacgccgtccaatattgcctgcaccgatgatgcctaaggtttgcccatacaaatcaaacagcggctcatttaataaacaaaatcgcccatctgcctgccaagtgccatcggttgcacgctgatgatagtatttggcaccacgcataatcgcaagcatcatcatcaaggtgtgttcaggcacgctattgaccgaatagcctgcgacatttttaagtgttatgcccaagtcttggcaggcttgtttatccacattatccataccagtggcagtcagctgaattagcctaagctttggcagggcttttaaaatatcgcgtgtgatgacaactttattagtaatcacaatctgagcatcgcagcaacgctgaatgataatctcatcatcttgtggggtttgtgaatatgcttgatagtccgtcacgcctttgggcgtgggtaggcacgcttgcttagaaaatgtgccagcatccaaaaaaacagctttcatgtgtcatctccgttgattgattttattcatgtgttgatttttaatcatatcatgcgtaattatatcgtgcgtaattatatcatacgtcatgctttttaaatcttgaaaatattgccctaaagagccataaagaaagttaatgtaaattctacttatttttagtaaaatagcaagtttaccaaaagcaagcaattttgaaaacaacacattaactgagtattttatgagtgataattttgccattggtcagcgttatttatccgacagcgaatcaagcttagggcttggtgtggtgattgatgttgatgaccgctgtgtccatatcttatttccccaaagcgaagaaacacgcgtctatgccaaggcatctgcactgctgtcacgagtggtgttttcggtgggtgatgatattaccgaccaagagggtaatttgtatcaagtggcacgctgtgaagagatttcaggggtaatgcgttatcatttggcatgtggcaaaagcttgatggagacacggcttgcggcaaatattactttatcaaaaccacttgagcgtctgctggcagggcgtattgaaggagcggattggtatgagctacgccaagatgccttgcgtattcaggcgatgcttgcgcgtcatccactgcgtgggctaattggagccagagttgatatcattgcccatcagttgtatatcgcctatgaagtcggaaagcgacttgcgccccgtgtgctactggcagatgaggtagggcttggtaagaccattgaggcaggtctgattatgcatcagcaaatcttgacaggtaaggttaatcgtgtgcttgtacttgtgcctgacagtttacaatatcaatggatgattgagcttaagcgtcgctttaacttagattttgcgttgtttgatttggtgcgtaccgctgccatcaaagaacataatcccgatcaaaatgtctttttgaccgagcaatttattattgcaggcattgatttattgcttgaccatcatgatttgtatgagcaagcatatgcagctgggtttgatttacttgtggtcgatgaggcgcatcacctgcattgggacgccgaacaaggcggtaatgataagtatgacttggttgctgattttgctgccagtattgcaggcgtgttgctattgaccgcaacacctgagcagttgggcgtagagagtcattttgcacgcttgcgtctgcttgatccgcaccgttttgatgatttggatgattttattgccacccaagatacttttgcagatgtggcgatggtggcatccttgttgattgatggacaagaactcaccgccaaacaaatttgtgcagtcgcaaatctgttgggctttgaggagatagagctggctgatattaatgccaatgagcgtttgcgtacacatattatcaatgagctattagatcgccatggcacagggcgtattttatttcgtaatactcgtgatagcgttcaagggttttttgggcgaaccagtatcccttatccgctgcctctgccaacggcatggcaaaatacacactacacccagggcaaattgcgtgaacagctgtggggtgaggagcaatatccagatggtgcatggcttgagcatgaccctaaagtggcttggctgattgagctactacgccataagcttaagcataaaaaagtgttgctcatcgctcgtagcggtgctaccatcgaaagcttagaggcggcacttcggttacatgcaggcatcaagacggcaatttttacagaacagatgagcttacttgagcgtgaccaagcagcggcatattttgctgatgatgctggtgcacagattttattatgttctgagattggctcggaggggcgcaattttcaatttgcccaagacttggtattatttgatttacctgccaatcctgatacgcttgagcagcgcattggtcgccttgatcgtatcggtcagattgcacagattaagcttcatgtgccttttgtgatgggtactgcccaagagcgtttgtataattggtatgatggtgcattaaatatctttaatcaaatcagcccaacggctcaatctgtccaagatgcttttattgcagagctaaagccattgcttgaaggtgctgacactccccaaaatcgtgaaaatttagccacactcatcgcacaagcttccatctatcgccaagcgttagaagaggcactacaagcaggccgtgatagattgcttgagtataattcatgccgcccaaatgttgccgcacgcattgagattgccatgcgtgagcttgatgataacaaattgctgccgctgtttttggatcgttatttgacggctgtgggtatagattatagtgtacagcgtgatggctcatggattatccatccgattgatgcatctgaggttgatgtggagggcattgaaagcctgcctttggatgaagatggcatgaccttgacctttagtcgtcagcaggcgcttgctcgtgaggatatacattatatgacctatgagcatccactgatccaagccatccttgagatgattttgacgggtacttttggtaatacacaagttggcctgttaaaatcagcggcactgcccaaggggatgctgatgattgaaaatcagtttcgtattgaggtgattgctgctaagtcattgaatttatcagcttatttacctaaacaaagtttgcgtatatttttgagtgaacgaggcgatgatcttagccaagttgccaccagtgaaaaaattctaccactcatcgatcgcttggataagggtcgtgctcgtcaagttgccaaggcgcgcgcaggggtcatagatgctagaacccaagacgccaaacgcattgcaggtatgcagcttgatcaaattagcacacaagccaaaacagcttttggggattatatgaacaaagaaattgggcgtctggttcgcttgcaggcggtgaatcccaatgttcgtgatgatgaaattttggcacttgagcaacgaaaatcccaaggtttgcaggcacttgatagcctatcattagtacccgacagcattcgagttttggtaacggtcgcacctgactgatttaataatattcatattcacagcctagaaatcatgtattactggtagtttttgggcttatttttcattatttagtattcattttatgtcatttgccaaagtttttacacgctcagttgttggtttacaagcgccacaagtatttgttgaagttcatctttctcaagggttgcctgctctgacgattgtcgggctgcctgaagcttcggtacgagaaagcaaagatcgggtacgctcagcactgattaactcaggatacgaatttcccaatcgccgtttgacaatcaatcttgcacctgccgacttgccaaaagatggggcaagactggatttaccaatcgcaatgggtattttggcagccagtggtcagattgatgataaggttttagcacagtttgaatttgtgggagagcttgcacttaatggagagcttagacctgtttctggtgcacttgccatcgctcgtgcaattaaatccagtccttgtgatggtaagcctcgtacgctgattatgccaagcattaatgctgatgaagcggtcaaagtgggcgatatgacggtgctggctgctgagaatttagagacggtttgtcgtcatttggatgtggtgagcggcatcagccaaaatcaagaacatctcttatcgcccgtaactttgccaagtcagcctcaagtgatgcagtatgcgtatgatttggcagatgtcaaagggcagcatcatgcacgccgagcacttgagattgcagcggctggcggtcattcgctattatttacaggatctccagggtcggggaagactttgatggcatcgcgtctgcccagtattttgccaccattgaccgatgcagagactttagaggtggcaagtatctattcaattgcaggtgtcaattatgcgtttggcgagcggccgtttcgtgccgtgcatcataccatctctgcgactgctttggttggtggcggctcaaaacccaaacctggtgagattagtttggctcataaaggagcgattttccttgatgagattccagaatttgatcgtaaaacacttgaaacattacgccaacccattgagtcaaaacagattaccatttctcgtgcaaatgctcaagtgtcatttcctgctgattttcagctgattgccgccatgaatccttgcccttgtgggtattatggcgataccacaaaccgttgccgctgtcgacctgagcaaattaaaaaatatcaagacaagctgtcagggccgttattagaccgcattgatttacatattactgtgcctgctttacccattgaggatttacaaaatgcaccaaagggcgagtcatcagatgatgttcgccaaagagttgtggcagcacgcaatatggcgattgctcgtcaaggtaaagccaattatgagctgacggtcaatgaacttgatcaatttgccatattgggtcaaaaagaacagcaaatgctcaaaatggctcaatcaaagcttaatttgtctgctcgcagttaccaccgtattttacgcgtagcacgcaccattgcagatttggccgccagtgagcacatcaaaacagcacatgtggcagaagctttaagctatcgataattgaattcaaataatcacgctgacatgctgcctgaaaaatctcccaagttataaagctttgggagattttatcatattaaataattgaaatatgaggattttataatcttgcagccagctcaaaaccctctttaatagctcgcttagcgtccaattgagcggaggatttggcaccaccaatcacctgatagtctgctttgggtgtatcgccaagctttggcatcaaatcattgacagattcttgaccgatacacagtacgaccgtatcaacacgcagaagctgagatttgccatcaatggtgatccataagccttcattggtaactttatcataactggcgcctgcaatttgaatgacgccagcttgtttgatggcggctttatgtacccatcctgtggtcttatttaatgttttaccaagcttgccttcactacgctgcaacagataaacttgacgcacaggcgtggtataattgggttcaaccaatgcccctttggtctgataacatgcctgctggtccacaccccaatgtgtaaagaaggtatcgacatccattgctttgggcttgtaagttgcatcattgactgcatcagatacactgctgccatgtgttaaaaattcagccacatcaaaaccaatgccacctgcacccaagactgccacacgctcacctgcgatttttttaccagtcaaaagatcgctataactgatgacttgtggcaagtttgcaccttccagagagggcaacatgcgtggaactacgccagtagcaataatcacatggtctgctcttgactgatttaatatggctttatccaccttggtatttaggtgtacggtgatattaaggtgtttgatttgctcacgaaaatatcgaattgtctcaaaaaattcttctttgccgggaatgacttttgccatattaaactgaccaccgatgtgcgtatgctgctcataaattgtcacttgatgtccacgactggcagcggttacggcagctgatagaccggcaacccctgcaccaacaataatgattttcttgggctttttggtgggtttgacgctgatttcactttcaaagcacgccaaaggattaaccaaacaagaggcgcgctgattggcaaaggtgtgatccaaacatgcttgattacagccaatgcaggtattaatcagatgatcttggttgcttgcagctttattcacccaatcgctgtccgccaaaaaaggacgcgccatttgcaccaaatctgcttgaccacttgacaaaatttcttcggcagtttgcggcatattaatgcgattagcggcaatcactggaatgttaatggcgtgtttgacggcggcagtatagcgtgtaaatgctgctctaggtacgcttgtgacaatggtgggaatgcgtgcttcatgccagccaatgccagtattaatgatactcacacctgctaactctagggctttggcaagcgtgatgacatcttgcatggttgcaccatcttcgaccagctcaatcatcgataaacgaaaagtgatgataaaatccatacctgccgctttacgcaccgcacgcactacctcgatagcaaatctcatgcgattttctaggctgccaccataactgtctgtgcgtttattggtacgagctgataaaaactgattgattaaatacccttcagaacccataatctcaacaccatcatagcctgcttttttggcaagtttggcggtatgagcataatcatcgatggttgattggatattgttttggctcatttggcgaggtttaaatggcgaaatgggcgattttattggactgggtgcgacaacaaaaggatgatatccatagcgtcctgagtgtaaaatttgtaataaaatcttagcaccatgcttatgcaccgctcgggttatgcgtgcgtgatgtacgatatcacccaagcggttgagtgtaccgcctgcaggtattagccatcctgtgcggttgggtgcaatcccaccggtgatgatgagtcccacaccacctttagctcgagcttcaaaataagtagccagtttgccataatgataaaatctatcttcaagacctgtgtgcattgaacccatcacaacacgatttttgagcgtagtaaagcctaaatccagtggctcaaataagtgtggatagttgctatttgggattggtgcttggggattggtgcttagtgctttggtcgggataatcttggtaagacgctgttttaaaaatggtaatggcatggctaatccctgtcctgtggcttgtcatgacgctgacggatgggcagcgagacttgctaaatttacaaaaagtgatttgtaatgatggatgatatgccctaaattttagcatatttttaagacaatcaagcagggtttttttggcatttgactcatgggtcatctaggctcaattgatgatatgctataaatcgtgaaatcatttgccaaattacccaaatcggagtaagctaataccaaatttattgagtgtaaggaaaatatgatgagcgagctgatcacaatctctggtcaaattacagttgatgatgtcaaatctttagcaaatcaaggatacaaaacactggttaataatcgtccagatggcgaagaaccaaaccaaccattatctgatgatattgccaaagtcgcaggcgagtatggcattgaatatcggcatattccatttgcaggcggtatgcttgagatgcatcatgtccaagaatttgcagatttttataaccaaagtcagcgtccgcttcatattttttgtcgtagtggtaatcgctcaagcatcattttgcaagcagctcgtgaccatgatttgttagatgaagaataagctgccaattaaattttaatgattaatgtgcttaattaattatgggcttaattaatttataagcttaataataacgcttacttaaatcgcttggtagaaatgtgataagtaccaaaaaagcaccgacctttaaaactgatcaaaggtagcttttaaaaggcttttggggtaaaatggttgataaatttatgatattttaagaaaagtatgatgacaaaacatatcccaattttagataatgttgccattgataaaatgaaaacggcaggcaagcttgccgctgatgtcttggtgatgttggatgaacatgtaaaaacaggtgtcagtacaggcgtgctagatgatattgcacaccagtatattcttgatcacggtgcgattcctgcaccactgaattataacggctttcctaaatcaatttgtacttcgattaatcatgtggtttgtcatggtattcctgaccatgaacggctgctcaaagaaggcgatattattaatattgatattacagtcattaaagatggctactatggcgatacctctaagatgtggattgtcggtcaaggttcagtgatggcacagcgtctttgccaagtggctcaaaaagcgttatatgctggtatgaaagtggttaaaaatggtgctcatttgggtgatattggtgctgccattcaagcggtggttgagcctgagcgttttagcattgtgcgtgaattttgtgggcatggtattggtcagaccttccatgctgagccccaagttttgcattatggcaaggcgggtacaggtattgaacttaaaacaggcatggcatttaccattgagccgatgattaatcagggcgtgtggcagaccaaaattatgaaagatggctggacggccatcaccaaagaccgtaagctatctgctcaatgggaacatacattgattgtcacagataatggttgtcttgtaacaacagcacgccctgatgaggatttaagctttttaagcagttgattataatcattcatagtctaatttatctttgttaaggcagcttagggctgccttgatttttcttgtgagtgatgatgggtttgtgctaggataatgcgtatctgatatgctggatttatcatgccaaattctaccgcccaaaattttaaacacttagccaaaacctgccatctaactattgcgttgccgccaaccattcaagatacattcataagcagcgagccgattcaagcctatcttaagaaattaaatcaagccattgatgatcaagtcgtcgcttatggcatgcatgcggttcatcatattgccaatctgctcaaagtgcgtacacttgccattgatatcatcttaaggcagttgtttgatttttatcaatttcccaaagattttgcgttatttgcggtgggcggctatggtcgcagcgagcttttgccagcttcagatgtggatattttattgattggtgatgagattggcaaagccaccaagccgattgagtcttttgtggcgatgctttgggatattggtatcacacctgctttttcggtgcgaagtgtcgatgagctgcgtgctgccgtccgtgaccaaaccattgcttctgccatgcttgaggcaagagttttggcaggtaatgaagatttgtcttggcaaccaattcaggcggttaaagaggtctgggatatagggtctttttatgatgccaaaatggcagaatcaaaagcacgctatttggcacataatgcgacagaatataatcttgaaccaaacatcaaaaacgcagctggtggacttagagatatccacatgattggatggcttgggcgattttattttggtagctcagatatcaaattgcttgcaaccactgattttatcaacgaaaacgaatgcaccatcttgcaggcaggtcagcgatatctatggtgcattcgccatcatttgcatacactggcgggtcgtggcgaggatcgattattatttgattatcaaaaagccatcgctgagcggtttggctattatacacgcactttagataccacccatcaagatatcacacaagctctagagacaatgatgcgtgtgtattatcagcatgccatgaaaattgcagctttttcagaggtattgtgcaaatatttttatgaaaattatttgtcagccactgcacgcctgattgatatcgatgagacattttatttgatacagtctggttctgaccatcaatctagacctgctaaaattgctatccgtcgcccagatgcttttttggtagatccagccaatttattaaaaatttttttggtcatgggtcaaaagggcattcgtcagatcgcagcaagtacacttcgggcaatttatgcttcaagcgatttgattgatgaagaataccgcaaaaatcctgtacatcgccaattatttttagccaatttacaagagttaaattatctgtttcatcgcttgcgtctgatgaagcgttttggggtcttgggtaattatttacctgccttcggtaaaattatggggctgatgcagtatgatttgtttcatcgctacacagtggatgcacataccctattattggtgcgtatcctgcatcgctttggtgatgacagtcttgataatcaagataaatacgggctggtagctgagatttatcaaagaattgcccgtaaggacattttggtcattgcagcgattttccatgatatcgccaaaggtcgagggggtgatcattctaagcttggggcggctgatgcttatgaattttgtttggcacatggtatgagtgaggcggatagtaagcttgtgcggtggttggtattagagcatttgacgatgtcgctgaccgcccaaaaacaagacatcagcgatcctgaggtgattgctaaatttgccgaatttaccagttccatcactcggctaaatcatttgtatgtcttgactgtggcggatatgaatgcaaccaatagccaactttggaatacttggcgagcgacactacttaagcagctgtacaccagcgtccaccaagtacacagtttgggcgtccatgttgttgataaagatcgagtgattgatgatagaaaaaataaagcacaagacttattgccaatggtggataatcaccgactaaaagccctgtgggatggttttggggaagagtattttttaaagcaaaagcatagagatatcgcttggcaatccgccgaaatcttggcggcagaacatcggctaaaacaaggcaagccaatcatcgccatccgagagcatagcgatgtgtccttacgagggatgcagctgttgatttgtgcacctgatcaggataatttatttgccacgacggtttgtattttggatcagttgggtctatcggtacttgatgcgacaattttatcagccgatattgacggcacaagtacagcggtggactcttatgtcattattgatcgattgttgccaacggatagtagtataccgttattgttaagccctgaacgcaccagtcagatgatattagggcttgaacatggtctaaaaactggtggtgtgccagtaccttcgagagtttttgaagtggatggtaagcttaaacattttatcgtaccaactcaagtctacttttcagaagcgacatcattggcacaccaagggcatcataaaatgcacctgatcaccaaagaccgaccatcattacttgccaaagtcggtgcagtatttagcgagctaaatattcaagtacatggcgcacgcattaccactttgggcgagcgagcagaggatatcttttatttaagtgggttgcatggtgtatctttgaatgatgatgctttggctaaattaaaatctgcgatcattcaggcattgagttaatatctttaatacctcatttaatcgatgattatttattaggataattacatttaatattatcttaaaataacttaatttacttgatctttgtaagcaattggtaccaatatcggttttaaagaataaaaatatataccaactattgataatttgataatttttatgccaaaataccacttagcaatttgcgtcaatattgagattatcgtcatgaatatcaaacccatcataaccacattatcgatgattactttgatgatcacgatgcctacactagcaaataccatcagtacacacggctttgatggcgatgatttgccagcttgtgctgccacgccgctgccagaggatgctaaatttgctatcatcggttctgattgcggttatgctgaagggctggcaccaatcatcaaagacgatcactatggttatgtcaataccgtaggcgagcttgttattcctgcagtttatcaggcggcttatccgtttagtgatggcttggcgttgtatcgtgaaaatgatcactatggctatcttgatacatctggtcagagtgttatcgctccacaatataccaaagcttgggaattttcggaagggcgtgccaaaattgagcaaaatggtaaatatggatttattgatacgactggtaaaattgtcatacacccaagctatgaagtgattggcgattggtttgaagaaggtttggttctttttaagcaaaaagataaatatggctttttggataaatcgggtaatattgccatccgcccacagtttgattctgccaaaggattttcagaaggcttagcggcagtaacgatgaaaacagacaaggtggatgaacatggtagatcaccacataaatacggttttattgatagaacaggtaaagtggtgattgatattaaatacgatttggcgtatgattttttatcaggtgtaacctatgtcgtagatggtgataacgcttattatattgataaatcaggcaatcctaccgccatgccaaattattttgaatgataagttactgattttggggtacttgcctttgatcatatgttatgaaacattgataaaaattggggcattgttaaattaaaatacatatcttaagctaccattccacttagcaaataataaattcaacgtgttttctatcattttttcggatttagaataacactttgactttcttgtaaatcttgctatgaaatgcccaatgagactattatagccctctatggtaaaagtttgagctttgcttgttatatgttttggctttaaaatgacttgacgataagatttccagtagtcactaaaaaacagttgcatgttatgggtatttaactgctgataaagtcgtttaaaggtgttagtgtctgttttaccacagacaaagcctaagatttgtttactgtttgtatcaatggcttgtttttttaatgtcattacttttttggttgcttcgttgcttcacagaaaaatagtgatggcaacctttgcatttgtatcgttgtttgccattgcccaagcctgcttttacaaagtgtgtgcagtgacattttgggcaattattaaatgtttcgttcacaagtttctttgtgctatggtaaagtattgagctattttaacttgggtattgttttttaacaataccagaatttgtaattttcagctattttttataacatctatattttgtataacatagctaaatcttatggtttaacggcaaaaattagttgatagtttgatagatagcaaaacaatcagatgcttgacaattaggtttaaaattgttatagtaaaatcatggggatgttctggcttcgacgctggtagcgaaacctaatgatgcatgtcaagagcgtgtgactcttgtaaatcaacatacatttaaaatagtcgcaaacgacgaaacttacgcactagcagcttaagggctgcttaggacggcacaaattgcctttggtttggttgctctcctagatgcgaatgcacaaaggatagccaaaattagcgttgcgatgattttggcgaaattcttagcaaatcgtccaatccatcctgactgtcggttcggtgcggattaaagccatagacagaatctaagcatgtagattcatagatgtagtactggcggacgcgggttcgactcccgccatctccaccatacccattaccaagcataaccacacattaacataaaccctaagcaaatcaaaggcttagggttttttcattgccttatattgccacctattaccccctataatataatcatttttgtatctctttatgttcacaaaaatagagatacaaaacagtttatccaaaatcctagtttacttttcagagatacaagttagcaaaatttagagatacaagaatgaaaagaaccagtattaaaaaacgccccctatctgatacagtcattgccaatttagaaccagagttaaaagaatatagcgaaaaagacagcaaaggactttatttgtttgtcaaacccactggggcgaagtcttggaaaatgcgttataaggatgctaaaggaaaatggcggtggcatgggctgggtgcttatcctgccgttactggggcaatggctagaaagctggtgcaagaaaaatttgcagatttggcacttggcttggatgaattaactgcaatacctgcacctcctaccgcccaaacttttaaaagtgtggctttggaatggtacaatgaacccagtattcaaaagctggatgatggcacaaaatccaaatatctaagcctgcttgaaaaacacatattccccaccatgggcaaaaaagccattggcgatatatctcgccaagtatggcttaccttttttagaaaactacaagaaacaccaaacccccaaacaggaaaacccatcattgaaaccgccaatagagccttgcaggtgtgtagtcgcatctatcgctttgcccttactcaagaattggcaggggtggaatttaacccattagagcatttgcacgaacgcctagaaaaacacgaacccaaacagcttgcccatgtcagcgaacaagacttacacaagctattattagatatcaaaaccattcccagcgaaattactcgcttaggggtgcaattgcttagtcatttatttttacgcccaaatgaagtgctagatggtgaatgggtggaaattgattttaataaaggtatttgggaaattccagcacaccgcatgaaaaagcgtcgtccccatgttgtgccactatccaaacaggcacttgccttattacagcaattacatagcttgactggctttgatactcatctattccccagccgtgccaaagaccgtaaaaacgcccatcagcggtttaggatggctttaaatcgccttggctatcatgatacgcaaaccctgcacggttttcgccatgttgctagtaccaagttaaacaactatacagatgaaaacggtaagaaatttgatgggcgtgttattgagtttgcattagcccacaaggtgcaaggtgtggcaggtgtttataacaaggcggaatatctgcatgatagaaaaatcatcaatcaatggtacagcgattggctggatggtcttgtaaaggctaatgataactaaattataaaaagtcatagaatgaataaatccgcccatgttgtatcataggcggattatttttaggcttattagactaataaataataatatatataatatagaatatcttaataatatttcagatatatataataaggaaaggggaaattaaaaaagcattttatcaaataaaataaatcgccataaatccgcccatttagataacaaccgccacgcctgccatttgcccagcaccaaaacaaccccagcaaatccaaacctgcaaccgcccacccattaaatttagcttattcgcttggcgtgtcggcacacaatcacacaaagacataccagcaccaaaaacaacataaagttataaaaacctaggaaaatggggaaaatgggaaaatgacactagcaaagctatatatagcaaggctttccctattttcccctattttgggcaaataggaaaatggggaaaataaggggaaaatgggcagttatcacgcctgccatatcgctaccaatggcatgatggctagtactttccgccattgcctaggactagcaatatgctaggcggtcatctaggcagactatccagcattggcataatgatggctggtattagtgctggtactggcataatgatgggcggtgctaactatccaaccattagccaaaaacaacataaagttataaaaacctaggaaaatggggaaaatgggaaaatgacactagcaaagctatatatagcaaggctttccctattttcccctattttgggcaaataggaaaatggggaaaataaggggaaaatgggcagttatcacgcctgccatatcgctaccaatggcatgatggctagtactttccgccattgcctaggactagcaatatgctaggcggtcatctaggcagactatccagcattggcataatgatggctggtattagtgctggtactggcataatgatgggcggtgctaactatccaaccattagccaaaaacaacataaagttataaaaacctaggaaaatggggaaaatgggaaaatgacactagcaaagctatatatagcaaggctttccctattttcccctattttggggaaataggaaaatggggaaaataaggggaaaatgaacggttttttggcgttttgggctggatttgtggaaatgggtgggggattgtagattattatagattgtcatcatctaattagattgctataatctaagataaactacaaaataggataatccccatgcaagatatttggcactatccaagagctgaactagcccaacaggtcatgggcttgtttaattccaatttatcgcacgccttaacattttttgcaccaaggcggaaaggtaagaccgaatttttactaaaagatattaagcctttagccattgaacaagattatcaagtattttatttcagctttttagacagtggcgaacaagcccaaaaacgctttatttatgagcttacagcctttggacaaggcaagataggcaaagccatcaatcagctatctagcgtggaaatacagggctttaaggctgaattacagcacttacagcatgatgatgtattacacgcattgaatgccattgccaagcaaaacaaacgcacccttttactactggatgaaattcaagccttggcaggcgtggcatattatccaattatagccagcctaagaaccgccctagataccaacaaagacaaaatcaaggtaatttttacaggttcaagccgtgagaatttacgcctaatgttttcatctgcccaagccccattttttcactatgggcaaaatgtagattttcctgacttgccaaaggcttttactgaccatttggcagatacattttatcataccaccaaacgccagcttgataaggatgcactatggcaagcgtttattgaattgaacaaaagcccccaaatggctagggctatgatagagaaaatggcacttaatccaaatctaagcctagatgatgccaagcaattattgattgatgatacagcacaatttaatgagtatttgcccacctatcgccaattaaccgccttacaacaagcggtattggtgttaatcgccatgggagaaaaccagccatacagccaagccaccaaagataggctgggcaaaaagctaggcatagagattaccacgcctgccattcaatccgccatccgttcgctatctaaaaaggggctgatattcaaaaaagacaatggcgtatatgaaattgatgacccattttttaatcagtgggtattagataattaaccaatagactaaatttaaccgtttgcatggctaggatagctaccaaaaaaggcgttaccatccacaccataacgccaacgccatgtactctatatatctttggtgtggttaggtgtggaatatgcaagagttttataacttatcacaggcttgcgattatctcaacgaaaattatccatcagtcaattttaacactcaaaagctattgcataaaatagcagaacttgacacgcctgcctatttttattttagcggatgccacacccttgcatggtataatacaaattttattgatgatagcctaacagaaaccgaaaaacaccaaatagagaatgctatagagcgtatttttagtgcattattagaccccattacctaccacgcaggcttattttttcagctatacaaaataaatttacagcaaattttactaaaaggatttacagaattggatgggcaaggcatgtatgattttttggaatacaaagtaaatggcgattgcttttgtggtgttgccatcccccctgatttaaataaaaacaataatatcaatacttttattaaagacattttaaaaaaagatggtttggatgttgatttttttctatcagattttgagatacacccatcatttacccatcacaagcatttagatgatgatattacccaaaaaattgccaatatcaaaagtctgccaaatgtgataaatattgagagtgtggaaagcctaaaaaacccgattgggaggaacagtatttatgatttggtaccagcttttcggctaactattgatgatttaaccattttgcacaatgatttgatatacataggaaatcatattacagccaaccagcaacagatagtcagcctaaaagaccagttggaacaaaaagagcgggaaattaacgcattacaagcccaaattgaccagcaagtaaccgccacgcctgccaattatgccttatctgtagaaaattcaagctatacaacgccctttattgatgctttaaatgcggtgatacaagaattttggataaactaccaagaacacaatattccacccaaacaaaatacaattattagctggattatggaacattacaacttgtcaaaagcaggggcaaaggcaatagaacaagtagcacgcccagccaaagcaaaaacaggcggaattaaaagcctgccataaatcacgaaatattcaatcaaaagcccttgaaaattcaagggtttttttgttttttgagtttaatttgtttgccattagccaatgccattagcccttatggtattgaataaccccataccctgccttgtatcatatccccacactgccaagcatggcatgactttaaccagtatcaccaaatgggggatatatatgaccttaacacctatcagagtaaccaaaaaacaagcgtgtgagctactagccattgggcgtgaaaagcttagaacgctggtagagaatgacccaacatttcctagaccttataagacaggtaataaaatgcaatcatctgtttattttgattatcaagcattgattgattggcataaagcacaagggggcaacgcatgaaaccagcaccactaacccaaaaacacaaaaaagccttatccgccacgaccaaacgaatgtatgaatatctattacaaggcaacagcctaaccgcccttgatggtgtgcaattgtttgggtgtctatgcaccacccagcgactgggtgaacttagacgcatttatggcgtacctatctatggcgattatttctttaccagtaatggcaaacgcctaaaacgctattacctagatgcggactatatcaaacagcatcaaaatagcacaaaccgcccatgggataccagccaaaacaccaatccagccaatgaccaataggaggtaatcatggcaaatcaaaccatcaaagtaaaccctataacattattttttaatgaacattctgtaagggtgtttaaaaatcgtgatggctttattgtctttgtagcaaaggatattaaaaaaatctttggggataaagcttgtaaagaattaccatcatattaccgcccatactatacagacagcaaggggcagggcttggagtactattactggcgtgatttggtggaattatatgccttgcaagtgctacacagccgccgaccatcgcctaaagcttattactttatcaatagcctgcatgatgaatttttacataccatcatggtacaaaatatgaccaagcttgatgaagtcaaaactcaaaaatgtatggataccatttggcaattaaaagaaactggatgatagcaaaagcccattacaagcggtgcaggcgtgaactggtacaaagacaccgcccacgcctgcaacagggcaaaaaacgcataaaaaccgccctaatgcacgcttatcacagcaaacaccaatccagccaatgaccaatagggggtaatcatggcaaacccaaaccaacaatccattttatcaccacaaatccaaaaacaccgccaaactatgtggcaagtagaaccctacaaccgccatggcagacgcttaaaccaaaacgcctacttggataagttaatacaccatgccaaaaaagcggaattgtcttttgtgggggcgttaatttattgtcgtcaaatgtgcatcaagcatggctatcccaccgccttttagtgcgattttaagcggtgcaggcgtgaactggtacaaagacaccgcccacgcctgcaacagggcaaaaaacgcataaaaaccgccctaatgcacgcttatcacagcaaacgccaataaaaaacccttgcactgggcaagggctgatgatgaaaaacatggcagtggcggactgctggaacagtccaccacccccacgacaaggtaattatatcatgaatttcactatttttaagcaattatctcaatttttgcaaaaatcgcttgaattttttgcttggcatagcgataataacgccactactaaaatacaagcggtacagccaagccgtcatacattggctatttttacgcccatacagtccacgggcgtgaagttgtcatattctgattttacagtttatggcgggttgatagaacctaatacaacaccctttttgggaaataagttcagccgtcttgtatcggtagttgagacctgccaaccctttttgtggttggttaaattaactaaaaatacaggagcgttcgccatgaatgcaatcacccataccatttcaaacaccattagtaaattttccatctttaccccagtagaaagccttgttttaggctttgtccttggcttgcctattgcttgccttgtcattggtattttagcgattatgggggtgtaagatggtgcattttgaaatctattgtaaggaattggatattttgcaattgtttagccaagaatatgatgccataaaacggtattatcagctaaaacaggctaatccaacggcggatataagattatcaaaaatcacacgcttagttaaggagcttaaccctaagcaagtgggctatattttatccgtcccaaagcttggcattaaacggctttttgatagccaatgccaagccgtcagcctagcggaacttatcgccaaggactatccagccacacccatcagtattgagcaaatgccacgctaaggcataccaaaagacggttttattttaaacaatatcaccgcctagggctttattacccaaaatttggtaaatcagcggtatttattcaataaaactttacaaaattaggaatattttatgaaaactcaatcacagcacaccacacacgccaccagtagcatgaccgaaattaacgcactggcacaaacgcccaaaaccattgaaattaaatcccttgatatggcggatattgtaggcttattgctatttcttagcagtgaaatgaaacaaataaaagaactgcttgggatattggcagatgacaacatttccgcccaacttgaacccaaacaaaaatcagcccttgcccaaaccatgctttttaaatgcgagtatttagcggattttgcatatgctgatgcacaaaggctaaatgaacacctaaaaggcactagccatcataaggatttttctcaaaatgctaagccgtgaagtgctagaaaaacaagaaatgtcattgataaacagcgataaggggcaatcatgaccaatcacaaaccagccatcataaacccagtaatggggcaatccgccccattcacccagcaccagcaggcaggcaaccgccacccagcaaaccgccaccgccacacgcccaaaaaaccacgctacgcccataaggtgcaacagcagggcaaagataccagccaagccagcaccgcccctaaaaccgcccaaaatagcacaaatacaggggcaaataaggcaggctttggcattggtggtaactataaccagccatcacgccaaaacccagccaaatcccatctaaaacagcgtcaaagagcggatttggcacgcctgccaagcccgatagatttttatcatacttatgggctaacacttaaaggcggtggcgtatggcgtatggcggtttgtccttttcatgatgacagacaccccagtttatccatcaataccgaccatgggggctatatctgccatgtatgcggtgccagtggcgatatggtgggcttttatatggcacgctttggggtggattttgtgcaggcgtgcaaagagctggatttataccgctaatcacgcctgccaagccaaaaccgccttttttaattttgatgatgaatgactaggaataacaacaatgtacaatctaaacgacctaaccaatatcgccaaaggcttatttggcaaactgataaaccaaggctttaacgatatcaccattcaccaatacaccgatacacaggggagtacgatttacgccaaagcacgcctaaaaaatgcacaaggtaaaaaacatatccgcccattcttttttgatatggataatcagtggaaaatgggcgaacccgtttttacgcctaaccaaaagcccttgtattacttgcataagcttagccaagcacaaagcgtatggatttttgaaggtgagcaaaaagcggatttgatggataatttgggctacaccgccaccacaacaggcggtagcaacaccattatcacccacgatttacagcccttggcaggtaaaaaatgcatattatggcgtgataatgataacgctggtatttcatggctgggtacttttattcaagccttacaagtattatcaccaccgcccacaatccatattgttgatgtagataagctgggcttggtagaaaaaggcgatattgtcgattatatgcaagagtgcgattttgctaccatgcaagccaaattacaggctttgccaatgctggataatgaccacctaagccagctatcacacgccaccagcaccgccaaaacagcacaaaacaaccagccagcaaccgccacgcctgcatcaaaacaggatgaaccgtggggcgaaccgtcgccgttagacgacaaataccacaaagaaaatgattatccacttgatagctttggtagtgaattagcgggtgtaataacccaaatcgcctattatgcacaagtccccttggcggtagctggtcaaagtgtgcttggcgtgttatctgccattggtcagcgtatggcaaacgccccatttttaaacacccatatccctgccagcttgtttttaatcaccgaatttcccagcggtcaaggtaaatcacaggcgaccaaattggctaattatgaattggcagaatgggaaaaagaaaactatttaaactatttggcagtactcaatgactgggaacgccagccaccaaaagaaaaagccaataacccaaagccaaaaagccacacttacatggtatcagatggcacgatagaggcggttacagataagtttattttggatgaacaaaaggatgtttattggaatacggatgaagctgggcaattttttaatggatatagtatgaaatctgataccgctggtagtagcatttcaagcctaactaagctttgggatggtagcccagttagtaaaattagaagtcaaaggggcaaaactgggcaagatagaacaaatgcctatgatgcacgcctaacgctggatgttatggggcaacgggtaatattagaaccagctatgacagacccagtattaattaatcaaggctttttacctagggcgttactggcttgcccaaagagtttccaaggctacagaaaatataacacgcccgaacggatgaccgccagcccaagccaagattggcaattggtgaagtattatcaaaaatgcagggatttacttattggtaagcctgccaagcgtgaaaatatgccatttaaagaccaaaatgcaaagcaagccttagcggactatatgcaagatgtagaaaacaagcaacgcactggcgaaccatacgcccaaatccctgcatttgctgggcgtatgggcgaaaataccgcccgtattgcttgcctgctggcattattccaaggtgaaaagacggtaagcaaagaccatattatcaaggctagtaagctggtggatttttctattgcagaacgcttgaaatattgtgatattgtggacgacaacaaaggtgatgcagagctattaatagattggcttattaagcgtgctaagatgcacaaaaaatccagctttggttattctgaagtgcaaagcaccattagcccaaaagtacttagacaaaaggcggtttttgatttagcaatagattatttgctagaaaaacagcatatccgaatagcttatcaagatgattgtagatttattgagattaaccctaagttattaaccgcctaagcacaaccccaccatccaaagcccttgcatacaatgcaggggctttatttttaccatgctaccgccagcaccgcctatcattatgccaatgcccatcatcatgccattggtagcgatatggcaggcgtgataattgcccattttccccttattttccccattttcctatttgcccaaaataggggaaaatagggaaagccttgctatatatagctttgctagtgtcattttcccattttccccattttcctaggtttttataactttatgttgtttttggctaatggttggatagtcagcaccgcctatcattatgccaatgcccatcatcatgccattggtagcgatatggcaggcgtgataattgcccattttccccttattttccccattttcctatttgcccaaaataggggaaaatagggaaagccttgctatatatagctttgctggtgtcattttcccattttccccattttcctaggtttttataactttatgttgtttttggctaatggttggatagtcagcaccgcccatcattatgccaacgctatccatcaaggctatccatgcaccttatccatgctatctagtattgaataagaccagccgacacagccaagcaaagcttaacagggttaaaataggcaaatgtattacaagatacaaattaaccatcaattcctaaccagtcatacgataaaattacttttgattgttgggatggctggggggtgctaaaaagtttcagataacaacccagcggacaccacgccccctctcgtgcataaaaaaaatttcatttggggaaaaaaatctccgttttctccgccttttttgaatatttttgggaaaaactttccaaaatggtaagattggtaatatatggcttttactagctggataatctcaaaaatgctaatatgttatataaaactttttggcatatattaagagcggggatttgttggcgtaatttcaccaaaataatcataattctgatgatagattggtaatatatgggatggattaggtgaaaaaatattcagaccatctataagcctataggggtggtttaaaagtgaaattggctaatgctaggaactcaccgtcccaagctttatttgcgtggtcaaaaccctatagggggtgtatccgttataaaactgggattttttggggtaattgccaaatcatagcaccttgttttttgtatctctatttgtatctctatcaggttcattttttgataactatttataaatcaatagcttatgatatttgttaagatgacgccatctccaccattttaacaatcatcaaaaatcattaagtatttttaagcgccataaatcatcataaaagccttgtaaatcaaggcttttttattgattattatattatataaaatcatgttgtatcatacaatttcacacacatttacacacagccacacacaggattaccgcaccaatgctcactgacaacatacaacaagttatttgatatctcaaatggcatgatacagtgttatatgatattaagtgccaaaccaacataaaaccaaaagaaaaatcacccaagcagacggctggggtgatttacagtgtcatgaataaacagtcatttgcctatcattcgtctgatgtcattgatatgtttcttgtttttgccaaagaagtgatatgctttttttagtaagcgtaatactttggtcagtttactttcggtaaatgaagctttgccatctggaatgatgacaacatttcctgactcatcaatcgtgcgacgagcattatcatcaaagcctttgctctcgccaagctcatcggtattttcagagacaatgcgtacaatttcttgtttttctctcaagggtgtagtttcaaacaattctgccaaagttacatccagctctttgatggcagcatcttcaaccttatctaagtgatgatacaattcaataaaccatggatcataatctgcagattctagttgatcaagctcatgacgaatcggcaatggataaggcaagcttttataaaatttccaaaaattgatggttcttaggtcggtttttaagatatattcattatttttggtttcggtaataaaatcattactgacaagttggtctaaatacatactccatttgggcagctctttgcgacccagcatgccacgaagttcatcttcgctgacagcttcaccattttgatagcgcttatatgttaaattaagcatatctaaaaggcttaataacggatggcgaacgggcacctctttggtatcaaaaatggtcaatgtataactgatttgaacgcctaaaagaatcaaattccaagaaatatatagccacaataagaaaattggtagggcggcaaacgcaccatagatggcttcatagctggtaaaattggtcatcacagtaccaaaaacctgcttgatactttcaaataaaatggcagtaacaatgcctgcgatggcagcattttttatgggaacttgggctttggggatgaaccaatataataaaataaagccacaagtcatcaatgccaaagaaaccaaatatgcccaaataccccaatcaatgccataacctgcaatttgacgatttaaaaagtccatactttggatagcacttgaggcaccaaatgccacacccaaaatcaccgggcctaaagtgatgattgtccagtagcgtataatgctggcagcaccgcctgagcgttcttggacacgccaaatcttattaaaagcatactcaatggtatttaaggtcatgattgcggtaacaaataaacctgctacccccacaagtcctaaattactagatttttcagcaaaagaacgaatatatcctgctacttgctcactggcagtcgggaataaattggcagagatggtttgttgaacttgttcacgcaaaccctcaagtgcaggcacgcttgaaaaaatcaccaacaccaccgttaatatcggaactaaggcaagtaatgtggtataagtgagactggcggctttttgctgagtatcgtcatcaataaaatggcgaacaagtaagcgtaagtacataaaccaagcatgatgagcaaaggggagtttgtttaaaaaatttgtcataatatccaagtcaaatatttatcactaaatatcgcattagtgtaacaaatattgcgacatattacagacaaagttttgtacaattatgtatcaaagttttagatagataaaaaatcttgaatatcagatgggatttagacattttttatacaataatcatcggtttattgttataagccatctaagcgataaattgtgctataaatgttcaacacgccctaataatattgctataatgtggtcatcaatttacctgttttttaagcgatgaatcaaaatgatggataatttatgaagataccttatattttggtattgtatgacaccaaccaagatgctaccaaaaatttggcctatctgattgcccaaggcgttcatgatgctggtcttagggcaatgattcgccgagtgcccaaggtgtcagctgtcagtgaacagtcgcatcctgccatccctgatgagggtgatttgtattgtacagcagatgatctaagagcatgctcgggattggcaatgggcagtccgacacattttggaaatatgtcagcaagtttgaagtatttttgggataataccgtttcaatttggcttgcaggggatttgcaaggtaagcctgcttgtgtttttacaacttcaggttcaatgcacggcggtcaagaaagcacactgttaacaatgatgatgccactgttgcatcatggtatgcttttgatgggattgccctacgctcaccctgagctatcggtgacagtccgtggcggaacaccgtatggtgccagccatgtttcaggtgttaagcatcagcatgtcatgaccgtagatgaacaagctcttgccatcgctcaaggtgtgcgtttggcgacactggtcaaacagttgcaagcagacagcttatgaaacaatcacaagcactcagacgcattaagcccatcaaacctgtacaccaagctttgcgtattacttggtatgcttggatttttatgactttggtgggatatcctgttgctgtgagcctaaccacagatgcctcactgtgggcaggtatgggcgttcaaagtttggtactggtgccagctgtgatatttgccccgacgatacatcaaggaaaatcaccttatgcactcatgtgggttagtatgattatgttaatttatttgggtgcatcaggtgtattgacattacttcgtatttacgaacaatcgccaaaggcagttgcaacagccgaattaatcgagtttttgttgctacttactatcaatagccaattgctcatcttattaaagcgtctgcctgccatgcatactaagcacacccacccaaaataaaatttacagcatgcttattttggtatttgtcataaaacataaaaatacccattaaaaagtcaggttgttgcatttttcaaataagagtttgccagtttttatgcaaaaaatggattaaaatggtaaattgccatcaatatcaatcacagatgattaaggtgttaatactaggtgcatccaacagaccgtcaatgactgttatggtttgttgccttaattgatcttggtaagctccatgaatatcactttaccatcagcagtttggctgaccttgacaggcagataatttaagcttggtgctaaccaaaagctggttgcacggttttggtcatcgtggatacggtcaatgcgtaccgtatcataagttcctgcaggtacagtaattttaccatggccagcacgacgaaatttggtcgtctctatttggtcacgcttgacaagttgatatgaaccattaaatttgccattaatcagctcttggcgaatttgtgtctccaaacttaaatcatcataagctggctttggcatggctaaagtaacagttttgcctttataagtgctgactgctgatttattggcacgattaaagcgtacactgtgagtattaccaatgcccaaaatgcgtgcagacatcattgaagattgtgggataatattaccattaacaaggctaaaacgggcttcttggcttaaggttgcaatccctgccgctcgagcattgacagtatagcgataattgttgccagttttggtgagtgtgcgtgtggctgtgcccgttttgccatcagcactgacacgataagtcgccaaatagcctgttaaatctgctgccatcgctgtcgctgacaatccgcctaaagtcattattaaaaccgccgttaagttttttctcaaaatttgctccaaaatatctaccaaggattgatgacatcttaaacacatctgttttgtacctgcttgacagataaatttaattcatcatcttggatgatacacataaaagaccatagacataagataatagggcattcatcatattttatcaacaaatttggcgaattatcttacggttaatatatcttacggctaataaaaattaatggcatactagttgggatttttgatggtcaatcattatgaaataaaaaaattaaaaaaatggcttgaaatttatcactgcgactccaaaaagcaatcacaactttttaattttcctcttagtaaattgattaacggagtcattatgaaaattcgtccattgcatgaccgcatcgttgttcgtcgtaccgaagaagaacaaaaaacagctggcggtattttactaccaggttcggctgccgaaaaaccgcaacaaggcgaggtgattgccgcaggtaatggtttagtgcgtgagaatggcgaggttcgcccattggatgttgcagtcggtgatgtggtgttgtttggtcaatattcaggtcaaacagtcaaagttgatggtgaagagctattaattttaaaagaaagtgatgtcttaggtgtacttgaggcttaattgtcagagtttggtttactttagaccatgttaacaaagttggtctaaaaaattaaattctcattcattcttatatttaattatcttaaattcataaactaaaaatcaaaaaatcggagtaaataatggcaaaagatgtaagttttggctcaaatgcccgcgaaaaaatgattgatggtgttaacattttggcggatgctgtcaaggttaccctaggtccaaaaggccgcaatgtggtgattgataaatcatttggtgcgccgaccatcaccaaagatggcgtgtcagttgccaaagagattgaacttgaagataaatttgaaaacatgggtgcacaattggtgcgtgaagttgcttctaagaccaatgatgtggcaggcgatggaacaacaaccgcaacagtacttgctcaagccatcttggttgagggcatgaaaacggttgctgcaggcatgaatccaatggatctaaagcgtggtattgataaagccgtacgcgccgctgttgaagaaatccgtgctatctcgacacctgctaatgaccataaagcgattgctcaagttggctcaatttcagcaaactcagatgctaccattggtgagcttatctccaaggcaatggaaacagttggcaaacaaggcgttatcacagttgaagagggttcaggttttgaagatgcgcttgaagtagttgagggcatgcagtttgaccgtggctatatcagcccttactttgccaataaacaagacagcttgacttgtgaatttgacaatccatttattcttttggtcgataaaaaaatctcaaatattcgtgagattgtgccactacttgaaaaagtgatgcaaaccagccgtccgctattaatcattgctgaagatgttgaaaatgaagcattggcaacattggttgtcaatactttgcgtggcggattaaaaacttgtgcggttaaagcgccaggttttggtgatcgccgtaaagccatgcttcaagacattgcaattttaacaggtggcgtggttatctcagaagaagtgggcttaagccttgagactgctgagattgagcatttgggtactgccaaaaaagtaaccattggtaaagaaaacaccgtcattgttgatggtgcaggtgataaagccagcattgaggcgcgtgtagagtcaattcgtcgtcaggttgaagaatcaacttctgactacgacaaagaaaaacttcaagagcgtgtggcaaaactatcaggcggtgttgcagtcatcaaggtgggtgcggcaactgaaactgagatgaaagagaaaaaagaccgtgtagacgatgcacttcacgctacccgtgctgctgttgaagagggtgttgtgcctggtggtggtgttgcacttgtgcgtgctttatctgcattaagcgacctaaaaggtgataatgaagaccaaaatgcaggcatcaatatcctacgccgtgcgatggaagcaccacttcgccaaatcgtcagtaacgcaggtgatgaggcttctgtaattgttaatgaagttaaaaatggctctggtaactacggttataatgctgcatcaggtgagtatggcgatatgcttgaaatgggtattttagatcctgccaaagtaacccgttcagcattagaacatgctgcttctgtcgcaggtttgatgttgaccactgaggtgatgattaccgataaaccagcaccagaagcaccaatgccagcaggtggtatgggtggtatgggtggtatgggcggtatgatgtaacccaatcgttcactggatgagcattaacttaactatccccaaaagcatttgtcttttggggatttttcgtattttaaataacttgatatgatggtcatgatattcttttatgccttaaatcaagatattttcaaggcatcattgagcaaattaccaaaaatcagctataatagaatcatttattattgagtatggatagatatggcaatcgttcacccacagattaaccctgttgctttagacttgggcatgatagagctgcattggtatggtttgatgtacttatttgcttttgtggtggcctattttttggcatgggtgcgtaccaaatcccgaacagattttacccctgagatggtttcggatttggttttttttggttcagtgggtgtgattttaggtggccgtattggctatgtacttttatacaattttggtgagctgattgctaaccctttatatctttttcgagtatgggaagggggcatgagttttcatggtggatttgtgggcgtgttgcttgccatgtggtattttgcacataaatataaaaaagcaccctttacggtactggattttatcgcaccctgtgtaccaacaggcttattttttgggcgaattgggaatttcatcaatggcgagctttggggacgaatctcatacgctgatgtgtcacatttgatgtatttcccgcaggctgcccgtgtagattttgagatgattcaggccaacccagctttacaagatattactgctaatatcggaggttatttgcttttgccacgccatccttcgcagctttatcaagcagcaaccgaagggatattattatttgtggtgctttggtggtttagtgccaaaccaagaccccgctatgccgtctcagcagtttttttattggtttatgggctaagccgatttatcacagaatttttccgccaacctgatgtaggctatgcactgatttttggttggatgagcaaagggcagctgtatagtttgccaatgattattgcaggtgtggttttaatggtgatggcgtatcaaaaacaaatctatgactggaataaaataaaatgaagcaatatcttgaattattacaacatattttaaaccatggcactgataaacaagaccgcacaggtacaggcacgcgttcggtgtttggttaccagatgcgttttaatttggcagaaggttttccattactgacgaccaaaaaagtacatatgaagtccatcattcatgagcttttatggtttttaaagggtgaaaccaatacaagctatttgaccgataatcaggtgacaatttggaatgagtgggcaacagcagaacaaacagctcgttttggcagagctgagggcgagcttggtcctatttatggtcatcaatggcgtaattttggtgcaagcaaaaaaagtgatggcagttatcatgatgatggttttgaccagatcgcttggttgatcaatgagattaataccaatccaaactcacgccgactgatcgtctcaggctggaatcctacagaggctgccgaggttgcattgccaccgtgccatacattatttcaattttttgtcagtcaaggcaaattatcttgccagttatatcaacgcagtgccgatgtttttttgggcgtgccttttaatattgccagttatgctttgttaacccatgtggtggctcaggtatgtcatttggatgttggggaatttatatggacaggtggcgatacgcatctttatcaaaaccattttgagcaagtgaaattacagcttagccgtgagccattgccactttgttcattgcgattaaatcccaaagttcggagtatttttgagtttggttttgatgatattcaaatcgcagattatcaggctcatccagcgattaaagcaccagtggctgtatgatggagaatattcaacttgtgcatgtggttgccatgagccaaaatcgtgcgattggaaaagataaccagctactttggcatattcctgatgatttgcagcattttaagcgtatcactcatggtggtgtgattgtcatgggacgcaagacttttgaatctttgccgaatttattgcccaatcgtacgcacattgttattacaagacaacccattggctatgaaggtgcggtgacggctcattcactacaagatgccattttacttgccaaagcttatgcacatgcaaaacagcagaataaaatctttatcatcggcggtggcgaaatttatcatcaaagcctagagatggcggatgtgcttgagattactgaagttgatacggtcattgaaggggatacgttttatcctgatattgatgaaaagttcataaaaacagatgaaactaagactttttattgtgataaaagcggatttcaatttcgcttttgtacttggcaaaaagttttaacatagcgtaaaaccgatctatttaaccgccgcttaactgattttaaaagggacataccatgcaaaacgctcctattgttattatgacggccgccatgctgacggcttgtagccagcaatcgacctatcaaaccgttagtggcgaaaccatgggtacaagctatcatatccgttttgactatgcagatcatttaagtgatacagcaagtatccaagctgctattgatgagcgtttgcaagcgatcaatgacagtatgtctacttaccaagaaaacagcaccatcagccgctttaatcgcctgcctgcaaagacagatcttgttattgatgatgattttattcaggtattgactgatagccaaaccgtctatcaattatcccatcgggcgtttgacccaacagtatatcctttggttcagctttgggggtttggtggtcagatgagcattgagcgtttacaatcaccaccaacagaagatgacattgccaaggctaagcaatgggttgggcttgataaagtcacactcaacgagcagaagcttagtaaatccattgacggcgtagggcttgatttttctgccattgctaaaggctatgcggtagatgtgattgctaatacattacatcacgattatggcgtggtcaattatatgatagaaattggtggcgaggtagcaactttgggcgttaatgataaaggcgatccttggacgcttggtatcgatgcacccattattgatagcggtgtcaaaaatcgaaccgtactcaccaccttaacccaaccaatcggtgagccgatgcatttggcaacttcaggcggttaccgcaattcaatagaatatgatggggtgcgttttagtcataccatcaacccagtaacaggatggcctgtggcaaataatgcacccagtgtcaccgtgctacatgatacagttgcattggcagatgcttgggcgacggcattaacagcactgccttataccgaagcgttggcacttgctaatgctcaaggtctgatggcgatgtttgtgatagaaaatccaaccaaaacaggctttgatattgtgcaaacagatgccatgcaacaaaaatttgccaaatagatagcctgcattgcatggcaatgcattttgaactacaatagcctaaagcaatgattttgaatgtgtcatttttattaatttattcatcagatcaataaaaatacagtccaacgattaaaaatttaaaaaggtttcagatggctaatttttcacccagtatcaactttgccaaacgctggcttgccacgccttttaaggctcgcacagtgatttatcaggaattagatgatattatcaatttactggataatgagcttttggttaaggatttttgttttcggcacgcagattttaatgctgctattacccaagaaatgcacaaaaatagcaacacacagaccaatcgcttgattcataccatcgagacaatatcactgaaagatgacgatgaagttaaagttatccaatcgccaaactttgatgagcttgaagctcggctgacccataatttatcagttcagattgatgagtttttgggtgagcatatggctcagctttctgaagatttgcgtgcctgggttaaaatggcagtacggcatgagctggcaaattatcagtccgaagaaaaactatctcaaaactaacttgttgcaataaaaatgactaattttggtaaataatccattaacatacgatagagaaatttatgagcaacaacagccattgtagtgatattattatcgtaggggcaggaccagcagggcttgctttttcaagattttttaagggtagtgatgtgcgtttgacgctgattgaaaaatcatcattagccgctttacaaaaccctgcctatgacggccgagagattgccttaaccaatacttccaaagaaatcctacaaaatctgggcgcttggcaaagatttgcccctgatgagatttatcctttaaaagatgctaaggtgtataacggtaatttaaattacgctctgcattttcaagtacctaagttaatgcacagacagcgttcgcttgaccgattgggtaatttgatctctaatcacaacatcaaaaaggcgttgtatgatgaagtggcaacgatggataatgtcacgctcatcactgatgcaactgtcactgatgtgaatacagatgacaccaaagcctgcgtgactttgatgaatggcaagcagttgtatgcagatcttgtgattgctgccgacagtcgcctatctggcatgcggcgtatgcttggcattggggcacacatgcatgattttggtcgtacggtgatcgtatttcgagtcactcatccgttatcaaatcatggcacagctcaagaatgctttttgtatggccgcactttggcactgctgccgctgaacgaaaccatgacaaattgtgtcattacgctagataatacacaagcagatgagctgttaaagatgactccagagcaattggctcacgaagctcaaagaatgtttggcgatggttttggtacatttacgattgcaggtacggtacatcattatccactgatgggcgttcatgcacataagtttcatgccaatcgggcagcactcattggtgatgcggcagtcggtatgcaccctgtgactgcacatggctataatttgggtctgcagagtgccaatactttggcaccactgattttacaagcacaccgccgtggcttggacatcggctcaaatcacctactatctatgtacaatcgtcgccatcaggcacataccagacctttatatcatggtacgaatgccatggtaaccgtatttacaacagatacgctgcccatgcgtacggtgcgtgatatggcgttgcgtcttagtaataacttccccccagttaagcattggattgccaaacagttggtaggctaaactatcaaattctatccattatcataaatctttatgataaatgttaatcaggtcaaaagtatttattttgacctgattaatgataagtaaagcaaatgatatatgcaatcatatgcacttgaataatatttcatcaaatcacagtgttaaaaataatcatgtatcaagtaatgagtgataacattttatttgatagtttgatgaacaattgacaagattgttaagacataatacgaaattttttgataaaacccaaattttgtagaaaaaatttggatagctttgacgattaaagtgttcagccgtgattattttttgtgcgatacgcacgagggtgggcatggtcatatactttcgtcagtgtgccaaaatcaacatgcgtgtatatttgggtagtgctgatattttggtgaccaagcatctcttgaatggcacgcagatcaccgctagatgacagtacatgagaggcaaagcagtggcgtaataggtgcggatacatattaagctcaatgcccgccatggtggcgcatacttttaggcgaagctgtatcgcacgcgtgctaagacgagtgccgtgacgctcactgataaacaacgctttacaatttttcttttgccataagttacgatgaggcaagtagtcttgaagagcaatcatggcttttttgcccacagggacttggcgagttttgttgcctttgcccaacacccgtacgatgccaatgtcaaaattaacatcgcccatatttaagcctgccagttcagataggcgaagtccactactatacatcagctcaaacattgctttatctcttatccatagacatgctttggctgtatcttcaggcgttttttggtcaagcagttgctttatgagcagctcatcagcgacagtgggcagttttcggggtgctgatttgattttatagcctgttgtggggttaactgcgataacaccttgcttgattaaaaattgataaaaaatccgaatggcagataagctaagcttggcactgatgggttttattttttcttcttctaagcgagtgctaaaaaatcgagttaaatcttggcgacggcaagccaaaggatcgccgccaagatagttatcagactccaaaaaattgaaaaactgtattaaggctgtttgataggttgtgatggtatgcttagagtaattttgtagtcttagctcatcacaccaagatgataaatagccccaagcaggtgagcttggatctgattgatggctagaatgagtgggtgcgatgaaatgcgataatctgctcatcagtaaacatcatctgcatttgggtcaagcttaatgccagccgatgccgccaaaccatctggactaaatacgccttcatacacaaaggcagttggcccagtcatgatgagtgagtagccatcttgccaacgaattgccaaactcccgccatataactgggcacgaatatccaccccttcatctagccagccctcccgaatacctgtcgcaacagaagcacaggcacctgtaccgcaggcttgggtttcaccaacgccacgctcatagacacgaattcgcacatgacgctgattaatgacttgaacgaaattgacattgactctttcaggaaatgcttcgtgtgattcgatgagtttacccaatctatcgacatcggcatccaagacatcatcgaccttgatgattgcatgcggattaccgatgttggcgacataaagctgaacaggtatgccatcgacatccaagcgataggcgcgcccaactttggtgatggtctttggggtaaaaggaatttggtcaggctcaaacttgggcttgcccatatctacttgcacccacccatagcgattggtgcttaggatgatgataccgcttgaggtttcaactcgtaaacgctgcttaaaagatagttttctggcttgtacaaatgaagcaaaacatcgagcaccgtttccacattgggacacctcagaaccatctgcattaaaaatccgatatttaaaatcaatatctgggcgacttggtggctcaacaattaataattggtcaaatcctaccccaatccgtcgatcggcaagtaggcgaattaattcgggagtcagtgtcatgcgttgggtaaccagatcaatcaccatgaaatcgttgcccagtccatgcatttttgtaaattctatgagcattggcctgtccttatttttagttatatcatttgtatcttaacatgaaaacagcgtggtggctaatgattttatggagtgattgatgaaaaatcactgataatattaaacagtattgatttggttttgtggataaaatttcaaaaattattaaaaaattaattaactaaatatcttaaataagccataaaaacttgtggcatgaacgcttgtaagtagataataaaaatgccctgaaagtttcagagcatctgcgatgggtgtgatttagatgagttcatctttccacagatcatctaacgcttcacgcttgcgaatcaagcgatgagtgccatgattgaccatcacctcgcacggtcttgggcgggtattgtagttacatgccatactaaatccatatgcacctgcacctgtgacggctagggtatcgccaacttgtaaagataaaatgcgatctttgcctaaaaagtcgctggattcgcagactgtaccaaccacatcccaagttttggcagtatcccgactaagcttagcgggaatgattgccatctgtgattcatacagtgctgggcgaatcagctcactcattgaagcatcaacgatggcaaagtttttaaattcggtgggcttaagcacatccacagttgtcaaaagtacgccagcatttgctaccaagctgcgacctggttctaagtacaattttaatccaagctgttttaagcgtgggagtaataccgttgcaacttgatcaatgctgacaggattttcatcaatatagcgtacgcccaagccaccaccaagatcaatgtgctgaagcttgatacccttatcggtcaaggtatctatcagctcaattaatttatccaacgcatcagaaaaaccatcggtatctagtagctgtgacccgatatggcaatcaataccgacaatcttaagatttggcaaatgatgtgcgtacacataggcagccaccgcttgttcatgactgatgccaaatttattatctttcatgccagttgagatataaggatgagttttggcatccacatctggattaatacgcagtgaaatgcgtgcgatttggttttggcgacctgctacctcattaatggtatcaagctcacttagagattctacattaaagcaatgaatatctgctttgagtgcatattcaatatcatcagccgttttaccaacaccagaatacacgacctttttggcatcggcaacttgaagcacacgagccagctcgcctttggagacaatatcaaaccctgcacctgctttagccagtgtttttaggatggcaagatttgagttggctttgacggcataacaaatttgatggtcaatggcatcaaaggcatcagtgtagctttgataattttctaaaagtgtacgctgtgaatatgcatacaaaggcgtgccatagatttctttgagtgtgtgagtgttgataccatcaaaatgtaaagtgccatcaatatactcaaaatgcggtaaagcatttgccaaagcttgggggtcaatatacagtgcaccatcttgatgatggctgactgggctaaaagtcataacattatcctaattttaataaaaaatagccgatatagttttagtagtcattcatatcatcgctgatgggtgtcggctcaatcacgggcgtactttcatcgggtagatataatgaacctttttgaccacaagctgaaagcaaacttatcattaaagataaaccaaataagtatttcatcatattcataaatcatcaaatccattactgtacttgggcaggcaagccaaattttagattaaacaaagttgcccatttgctgaatattttagcacaacacccaaggcttgggcgatcaattagaccaaatatgctaaaaattggtatgcatttttgccaaattggttggtggatgtgaatttggctcacttaaatggattgcgttatttatcaatggttatgagtgcatatttttcaaaaaattatatttaaaatgatatttattgcttgacaagaaagatggtacaggttgatttattaggaattttaagataaaatttcttgttcacagtcaacacaatagacgcaatacatcaaggagcgtacatgagcttagcaaatcccactttggttctaaattgtggttcttcatccatcaaatatgcccttatcagtgaagatggtgggagtcgcattgagggcttggcagaaggcttgggtaatcctgaagctcgcattaagcataaaaatttagagggtgaagcgacgattattgacattccaaatggtgttcatgctgacgcactgaaagttatcttagaagatttgattaaagcgcataagcctgtggttgtgggtcatcgtgtggtgcatggtggcgataaatttaaatctgctaccgtgattgatgaagaggtgttatcaaccattgaagcattgacaagtctagcaccgctacataatcctgccaatgctgcaggtatccaagcgattaatgccatttatcctgatttaccacaggtagcaatttttgatacggcatttcaccaaaccatgcctgagtatgcctatcgttatgcagtaccaaaaaatctgtacactgagcatcaaatccgccgttatgggtttcatggcacttcgcatgcgtttgtttcaaatcgtgccagccagcttactgatgccaaaggcgtacatggttgggtggttgcccacttgggtaatggctgctctgctaccgcagtttatgatggtaaaagcttagatacctcaatgggtatcacaccgctagaagggctgatgatgggtacacgctcaggggatgttgatccaagtttgcatattcatctaaatcgtacattgggcttatcattagacgaagttgacaccttactcaataaaaaatcaggtttgcttggcgtatcaggtatctcaaatgacatgagaaatcttgaagctgctgataaagagggcagtgcagatgctcgtttggcactggacatgttcgcttatcgtaccgccaaatatctcctaagcctaactgcagcattgcctgagtttacaggcatcgcctttacaggtggtgtgggtgaaaatgctgttgaaatgcgtgccgatattatcaagcacctaaaacatttgggtgcaaaaattgacaccactaagaatgataagttgatgcgtggtgctgaaggcagtttccatgccgaagattcatcgattgagctttgggtgattcctaccgatgaagaataccaaatcgccagcgaaagccgtgcggtcttgggattataatttgttataaatacttaactaaccgttcaagcagttgagcggtttttgtgttaataccaatctatcatatatttattaagggtacatatgaaagcactgttattgattccgacatttgacgctccaaatttttcatccatcgtagaaaattttgccaaaagcattggtgcagcttacattgcaccatttgatggtgaaggcgatagcaagcttagagtagcagtcactgaaggtcggcttgatgagatgcttgaaaaagtagttgctgcccaaagtgcaaagctgacggttgttaaaggtttggcgactttaccaaatacgccttatgccagtttggtcaatcgtgatttggcaaatggtctggatgccgatgtattatttgtcagccaaaatgctgaagagttggctgtatttgctgctgcgtttggcggtcttaagtctgagcgtgtgctgggtgttattgcagcaggcgtagatgaatttggggtaactgtatgggcaacgattgatggtgagcagttgacagttgatgaagaagttatcaaaaactatcaagcagcaacaagagtcaaaaaactctcaccatatgcgtttcgcaatcaagttgtccaaaaagcacaagccgccaaaaaacgcattgtactgccagaaggtgatgagccaagaaccattgaagctgctgtaatttgccagagtcgtggcattgctcagtgtgtcttattgggtgaacgcaccaagattgaagcggtagcagcagagcgtggcgtggtattaccaaatgatattgaaatcattgaccctgccagcatcgctgaaaaatatgttgcccccatggtagaacgccgtaagggtaaaattgatgaagctggggcaaagcaagcattacaagatacggtagttttgggtacgatgatgctacatatgggcgatgttgatggtttggtatcaggagcggttcatacgactgccgacaccattcgcccagcgtttcaattgattaagacagcaccacagtacagcttagtttctagtgtcttttttatgctcttgcctgaacaagtcatggtttatggcgactgtgcggtcaatccaaatccaaccgcagaacagctggcagagattgctattcagtctgccaaatcagccaaagcctttggcattgacccaaaagttgccatgatcagttactctaccatcgattcaggttcaggtgttgatgttgatactgttaaacaagctgtacaaatcattcgtgaaaagtcgccagagttaaaagttgatggtccattacaatttgatgccgcaactgtcaaaaatgtcggtaaacaaaaagcaccaaattcagcggtagcaggtgaggcaaatgtcttaattttccctgatctaaatacaggtaacacgacctataaagctgttcaacgcacagctgatgtgatcagtgttggtccgatgctccaaggcttgaataagcctgtcaatgatttatctcgtggggctttggtagatgatattgtttatacaattgctctgactgcaatacaggccattgatgaataaccttaagatttgattggcactgtggatacaacacaaatcagttattggcttaagcgatatttcagatatcgcttaagggttggtaaaacaaagatggtgattgattgtttaacaacagtgaaatatggcatgatttttcttgcatatttttaaaaatcatcgtataatgttttaatatctatttcttgccatctattttattatcatatttatgcttaatattgaatgatatcgtattaatattaagtaaattctcaacggagtaagctcatgcaagtcttatcatcgctgaaatctgctaaaaatcgtcatgaagactgccaaattgttcgccgtcgtggtcgtacttttgtgatttgtaagtcaaatccacgctttaaggctgtacaaggcggtaaaaagagaaaataagctaaataacccaataatcagcctaaatcattgatttgattaattattaggttgtgttattttagtagattttgatgaacagtattaaattaatactgttcattttattttgtgtgatgattttgccaacgattaccattctctgcgaaatacccaatgattttcatcgctgacactgggggcaaaataataaccatcggtatcaaaatattttaaatcttcaacatcttgaatctgatgcttagcggcataattgaccatcagtccgcgtgcttttttggcataaaagctcacaactttataaccatcattttttgcatcttcaaagcgaggggtaatgatacgcccttgaatttgtttggggtgaacagcaccaaaatattcttgagaggcgagattaaccaaaataccgtctgattgctttaaatgctgattgatttgatcagtaattttatcgccccaaaattgatagagattatctgcctgctttgtctgaaatttagtacccatttccagtcgatagggtaatattaaatccagtggctttaatagaccatatagccctgataaaatacccaatctatcatctaaataattaatttggttttcgttgagatgatacgcatccaaacctgtatagacatcgccagcaaataaataaatggcaggtttggcattttcatcaaagggataagcccagtgctgattgcgaatgacattaagctcggcaatcttggcagagacgcccatcaattcttgcaggtcaatcacatcatagttttttaaagtttgcattagttgagcggcttgctcaatgaatcgagggctgctataaactgtatgagatggtaacggaacagcagtcttttcatctaaatttttggcaggagataataaaaaaaacataatcggctcttatttatgattaaattgtctatgaacaaactaccaaacctataccaaaaatgcgggtttttaaaacaagatttcatttttgggtatccaaaaggcaggcatcgccgataaatcagatgaaattttatttggcaattttacaaattttagtataatcaaaatggcgtggttttgtatctttgatttttatgatgaaaaaggaatgatgatgacaattgtgacggattttttaatgacccatgataagcggcgtattgcaatcattacattaaaccgacctgatgcactcaatgcgctcaacttggagatggtggcagccattcaagcgtgtttagataaatgggcaattgatgacagtgtggctgcggtgttgctttgtggagcagcagataaagcattttgtgcaggtggcgatattcgtggtttatatcatggctataatcccaagattttcccaaatccaactgccaaggcgtttttttctacagaatatgccttatgtaaacaaataaaaagttatacaaagcctatcatcgtttgggcggatggtattgtcatgggtggcggtatgggcttggcagtcgcatcaagtcatcgcattgtcacgcaaaccacaatgatggcgatgccagagattagtattgggctgtttcctgatgctggcggttcttattttttaaggcatatgcccaataagatcggtttatttttgggtttgacaggtgcaagaattaacggtacagatgcacttgctttaggtgtggcagattttggtatggcaagtgatgattttgatgtgttaatacaagcgctgaccactgccgattggtcagatgatgccaccaaaaatcatcagatgctcaatgcactgcttggtcagttgcatcataaccacactctaccaacagggtggcttttgcctcatcgtgatgagattgagcgtatgatgcagcaggcgggtgacttggcagcatttgatacacttgctagattgggttttaacattgaatatattcaacaggcatttaaaacttatatcgctggctcaccgacatcggcggcgattacatggcatatggcaaatcaagtggagaatatgagctttgatgaggtgatggatttagaatatattgttgcaattcattgctcgcataatggcgaatttgctgaaggtgtgcgtgcattattgattgataaggataaaaatccgaagtggcaatatacgccagatagcttgcctgatggttatatcaaaagccattttaaagcttggtaataccatttgtcttaggcaacctacctttgatggctgtgataagataatattaagccgtcaaaggcaggtatgctcccacttaactcaattataatgatggatttagcagacgatgaagaaagtgaacaatcagatttggttcaatggcaattgtcgctactacgccaaagactgcaccaaaaagatgtgctgagtggttgatatttccgccatctcggcggtcagcccaaatactataagccacataagcaatcgcaaatacaatcgcaggaatgggtaggacggcaaataaatacagcgtattccaaggggcgaataaaatataagcaaataaaacagcactgaccgcacctgatgcacctaagcttgaatagtaagtattgtttttattgcgtgcataagtaggtagcatcgcaataataatcgccgaaatataaaaacccacaaagcccaaattgccaaatttatcaatataaaaccgttcaatcacacgaccaaaaaagtacagcgtaaacatattaaacagtaaatgcatgccattggcgtggataaatccatgagtaagcaagcggtcatattgacctttattgacggcaggtggataaaaaatcaatcgctcaagcaaaggtctagattgccatgcggcgatactgatgatgacagtaatgataataatgacagttgtgtgattcatgatatgtgtttgcattgattgataaatacacgcttagtctagcagatttttggtaaaatgcttagcctttgtacgattttatggctaattttaataacaagtgaataaaaactaccaactttttggtaaatttgattttaagtataagtggttcatgtaatttatatgccaaaaagtatgtgcataaaatcaatcaaatggtttatctgtcaatttgatgagtgggtattgagggtttttgcttcatgattaaaatcattgagaattaattactatcataattactataatattacagatatgtaaataaaaaaccattcatcatttacttttgtaattgcttaattttttttgagcgaataaaaggcggttttgtttatcaattgttgccagcgcttttaagttgccataaaatcagtcacaatagagttataaaacaagtggcttcaagcaacttgttgtttttcttaaggacggcatcggcattttgctgatggataatgaaatttaaatttaaaatgacctatggagtgacttatgagcttaattaataaattaaatgaacgcattacgccgcatgtcttaacttcgattaaaaatcaagatggcgataatgctgataaatctaatttgttaaccgcattttataccatttttgcaggacgcttgagtaatgaagatgtgtatcagcgtgccaatgctttgcctgataatgagcttgagcatgggcatcatctgctcaatgttgcttttagtgatgtttcaactggtgaagatcagattgcttctttgagtaatcaattagccgatgaatatcatgtttcgccagtaacggcacgcaccgcaatcgcaacggcagcacctttggctttggcacgcattaacattaaagagcaagcaggtgtattgtctgtaccgtcttttattcgtactcaattggctaaagaagaaaaccgtttgccaacttgggcgcatactttattgccagcagggctatttgcaaccgctgccacaaccaccgccgagcctgtaacgacagcctctgctgttgtgaaagagcctgtcaaaccaagtgttgtgacagaaccagttcatccagctgcggctaccaccccagtcaaaacaccaactgcccggcattacgaaaacaaagaaaaaagtccttttctaaaaacgattctaccgattattggattgattatttttgcaggcttggcatggcttttgttaagagcatgtcaagacaaaccaacacctgttgcggcacctgttgcgacagatacagcacctgtggtagcggataatgctgtacaggcagacccaacacaaacaggtgttgcccaagcacctgcaacgcttagcttgtctgttgatgaaacgggtcaagcgttgtactcgcaccgtgctcaggttggtagtgaagagcttgcaggtcatatccgtgcagctattgctcaagtctttggcgtacaagatttaaccattcaaaataccaatgtacataccgctacgatgccagcggcagaatacttaccagcaattttgggtttgatgaaaggtgtaccaaattcaagcgttgtgattcatgatcatacggtacgctttaatgcaaccacgccagaagatgtagcaaaactggtagagggtgctaaaaatattctacccgctgattttactgtagaagcagaacctgaacttgatattaatactgcggttgccgatagtattgaaacagcgcgtgttgctattgttgctttgggtgatacggttgaagaaaatgagatggatattttaatcaatgcattaaatacccaaatcattaactttgctttagactcaaccgaaattccccaagaaaataaagaaatcttggatttggctgccgaaaaattaaaggcagtgcctgaaacaactttgcgtatcattggtcatacagacactcaaggcacgcatgagtataatcaagatttatcagaatctcgtgctgctgctgttaaagagtatttggtatcaaaaggtgttgctgctgaacgtttgaacactcaaggtgcaagttttgattatccagttgcatcaaatgctaccgaacaaggtcgcttccaaaaccgtcgtattgagtttgtacttttccaagaaggtgaagcaattactcaagtcggtcatgctgaagatgcaccaacacctgttgcacaaaactgatcattttgttattggttatgagttttagattgggccaaatgaatgataatataccaatcttacaagtacttttaataaccaaaaccaaccgtaatcaacccaagaaccaaattacccatcggtcatttggttcttgggtagtttttattggctctcaatatatgatgtagaccaatttgacccaaaatagatcagagtttgggtcttggatttgcgaccatatcgtataactgacatatcttgaacacaaaaaagcataaaatgacaaaattggtattattcaataagccttacggcgtgcacagccagtttaaaaaagatcatgacggcatgatcactttagcggattttattgatgataaaacgatgcgtgtggcaggaagattagataaagattcagaagggctattattattgactgataatggtaggctcaatcacgccatcacaacgccaccaactgccaaaaatgccaaagataagtatacaaaatgtgccaagacttatttggtgcaagtagaaaatattgcaacaaacgtacaaatacaggcattggaacaaggtgtgatgctaaaagatgggaaaactttacccgccaaagtacaaaaacttgatgaaaacgaactaccgattcgtttatggcagcgaaatccaccagtccgccagcgagtaaatatcccaaccacatggcttaagataaccattgttgaaggtaaaaatcgacaaatacgccgcatggttgcccatgttggtttgccctgcctaaggttaatccgatcacaaataggcatttggcaactgaatggcttggcagtgggtgaaagccgagttttacagttagaccagcaaacattacttaaattgggtctgtcagctcagccaacacccaagcaaaataagccaaccaacttgatatcaagcaatacaaagggagcggtcaatccaaaatctggtaaaattcatttgttaaaaaaaccatcttggcgtgtccgcccacctaagtttcgtgcttaatagttattagctcaacttgttaaatcagcaaaattcagccataaaccgccatcaccttcaagtttaactgtttggtgtatggttttttggttgttaatggtaaatgacaacagttcatctcgccgaaacgcgtgtacggttaatggcgagcctgtggtattttgatgcttaaccagccgattgagcaatgctgatgttgcttttagcccatcaattgcaatgatggtatcatcataagatagtcccgcatggcttgcagcagattgacggctgacatgagtgatggtcagtccatgggcatgttcattaaagcttatgccccatgttttatgtttatcctgaaacttagcttgaatggcaaattttgtaaaataatcagtcaatggtaatggatcgacaccaatgacatagcgatgataaaaatcttgccaagcttcttgccccatcatttgagcgatgatctcgcctagaatctgggtggtcagcccaaagggttggttatttgtttttatataacaggctttgatgacatcaaacagacgatatttgccgtctgttttatccatcagcatcatatcaagcaataaggcaaccaatgcacctttattatagtaactgatgccttgattgttggtattttcatcggtacgatatagcttaatccaagcatcaaaactggattctgctacgctttgatgtaacaagccttctgtttgttgatagcgattaatttgtgccgtaatgagttttaaatagctggatttatcaatcacacctgagactaaaagcattaaatcatcaatgtaggaagtgaagccctcaaatacccataaaagtggcgtataagcctcttcggtgagtgtattgttcatcatcacatcaggcttgactgtttttacccaccatgcgtgaaaatattcatggctacatagcccaagaaagcgttgataatgctcatttgggatttggggttcgtcaaaagcaggcatatcgccacgaggactgattaaagctgttgaattgatgtgctcaagtccaccatagtctttatctgttaccatggtcataaaagtgtaatctgcaaagggagcatcgcccagccaattgacatagctttggcaaattttggttaaatcagcctttaggcgatgcaagttgccatgatggcgacctgccaaaaaaaatcggtgtggcaggcaagtttttttatctttgataatctcaaagctgatttcatcttggttgccaatttcaaagggaaagtcaaaatactcagaagctgccaagccattaaaacgatattcaagcccatcactcgtgctggtttgctcaaattttaagccacaagcaattgtgcatttcagatggtttgccaaaaatgtctttggtacaaacagtgtgatattagcttgagtctgtttatttgcctctggaagtaataataatgaggtaaaatttccaaaaatacgcgtagcatcaacgaatgctgtacgcactgatagatctcggcagtacacttcatagtgtatggtaatatcatcaccttgcttggcatttggcagtacgaatgtttttttgtcaattttttcggcacgatggcgtattaggctatcaccgatttgataatacactgtggtgatatttttactaaattcacggattaagtaactgcctgcaatccatgttaccatagaaaaagcaggagtatcgcttaacgctgtgtgatgaatgcgtatatcggctaaatgttcattaaaccgctcaaaactaatgtgataatttaggctcattgtctttttaaaactcattgatggattagaattactgtggatttgaccatatgactatttaattaatggcttaatttaatggcaatttgccaagctcatcatgttaagatgagtttgaatgaatcatggattgtttttggtatcaatcattttggcagtcatgacattaaacaatgattatatcaaaaaaaattatatcaaaaagattatatcaaaaatgccaaatagatgaaatgactgatttggtaccataaaatatcgtattttttagaacttttttatcaagtattggataaaaggtgtttttttggcatatttttgctacaatggtaattaaaatttgtcatttgacagctttggcacccgcctaagcgatggcaatttgtttatcaggaatttcttatgacaaccattaacaaagatactgttgtacaattcaactataccttaaccaatgccgaaggtgagattcttgaccaatcacgagatcagccattggtatatttgcacgggcatcataacattatcccagggcttgaaaaacagatgatgggtaaatcagcaggcgatacatttaaagtaacgattgcccctgaagatgcttatggcgaatatgttcaagaagcagtacaagaagtaccacgagccaattttcagggtgtggataacattgaagtgggtatgcaatttcaatcacaaacggatgatggtcatgtgatgcttgtcactgttaaagatgtgaatgatgagattgttgtggttgatggtaatcatcctttggcaggcgttgagctgacttttgatgttgaaattgttgaggttcgtgcggcaacagctgatgaaattgcccatggtcacgcacatggtgcaggcggtcaccaacattcataactttaagttagcctgataaaaaacccaaagcatcattttgggttttttatttaccatcattgtcataattattttacaaatatgattaaccttatagttaataatcaagcatccagtttcgtcgcagtattttatgcctgagtaaattggattaagtgaattttattcatcttctttaaaaaatatttcgcttttatttagattaaaaatgcggtttaatatctcatctttaaattttagccaagaggtaacaacatgaccacacaatttcaatgccgagtgcatactcagcgttttgatgaaaactatgagccagcgaccagcactcgtttgaccaccaactttgccaatctggctcgtggtgaaaatcgcaaagaaaatctacaaaatgccatcagaatgattaacaaccgttttaatgatttggcacattgggacaatccgacaaatgaccgttattcggtactcattgacattgtgtctattgatgttgatgtggcaggtaagggcgaatttttctcaggattagaatggctaaaaacatctgtggttgaccacaaaacaggcaaaactacccctggcatcattggcaacagcttttcatcatttgttcgtgattatgattttagcgtattgcttcgtgaatataataaggataaggctgaatttagtgtgccagagggttatggcgatttgcatggcaaattattcaaattcatgatagcatccgaagaatacaaagcccattccaaaaaagcacccgtactgtgcctaagcgtggcgaccactcgcacttatcacagaaccaccaacacgcatccgattttgggcgtggaatatgtgcaaaatgattattcattgaccgatgagtattttgccaagatgggcttaaaagtgcgttattttatgcccccaaaatcggttgccccttatgcgttttattttgatgaaaatgctgatttgttgaacgattacaccaatttagaactcatcagcaccatcgccaccatggaagcattccaaaaaatctatcgcccagagatttataatgccaattcggttgcaggtcagatatacaagggcagcttaacttatgaagattatgctgtgccaaaagtggattatgaccgtgtggagcgtaatgatttggcagtcaaacaaggcaaaatcgccgaagagcagtttatcaaaccatatcaagagattttggatgcttggcttgccgaaaaataagcgataagtattaatcaatcagccgatgaatgtttatcggttggttgattaaaatttttggtataatggcaaatttagtttaggaaaatataatgagcaaaattttacttcccacatccaccgcaggcagtttgccaaaaccatcttggcttgctgaacctgaaaaactgtggtcagaatggaaatttgagggcgatgagttattacaagccaaacaagatgctctgttggtgtcgcttgctgagcaaacccatgcaggcattgacattgtcagcgatggcgaacagactcgtcagcattttgttaccacattcattgagcatttggatggcgtagattttaatcagcgtgaaactgttcgcattcgcaaccgctatgatgccagcgtgccaagcgtggtaggtgaggtgtctcgcccaaaatcggtatttgtagacgatgccaaatttttacgcgctcatactgacaaactcatcaaatgggcattgcctggccctatgacgatgattgatactttgtatgatggtcattacaaaagccgtgaaaagctcgcgtgggaatttgccaaaatcctaaacgaagaagcccgtgaattagaggcggcaggcgtggacatcattcagtttgatgaacctgcgtttaatgtattttttgatgaggtgaatgattggggtgttgcaaccttagagcgtgccatctctgggttaaaatgccaaacagcggtgcatatctgctatggttatggcattaaggcaaataccgattggaagcagacacttggcaatgaatggcgacagtacgaggagagtttccccaaacttcaacaatcaaaaattgacattgtctcattggagtgtcaaaattcacatgtgccaatggatttgattgaactcattcgtggcaaaaccgtcatggtgggtgcaattgatgtggcaacaaaccaaattgaaacgcctgagcaagtggcagatacgcttcgtaaggcgttacagtttgtggacgctgataaattatacccatcaaccaactgtggcatggcacccttgtctcgcacagtggctcgtggcaagctcaatgccctaagtgaaggggcggcgattgttcgccgtgaactgcttggtaaataactaagattaaaactgagtttgtgaaaccgtgcttattagcaaaaaatttatcataagtcagttttgaatacaaaaataactttaagggtgtatcaactacatcctttttaattttaaatgggaaaatcatggtagaaaaattaatttttaaagatgccatggcgcgcctagctactgctgttcatatcgtcactaccgatggcgatacaggtcgtcatgggtttaccgcatcggcggtatgtagtgtgacagattcgccaccgtcactgcttgtgtgtatgaatgccaatgctcgctcttatgaacattttatcgccaatcaaatattggcagttaatactttatccgctgagcaggcacatttatcagatgtttttgcatcaccacttgaatcaaaggcacgatttgagcatgctgattggagtgtgttaagtacaggcgcaccagttttaacagatgctttggttagttttgattgtgaaattcaaaccatccaagatgttggtacgcacagtatttttatttgtaaaattatcgccattcgaaaaggtgagaatgaaaagcgcagtttggtttattttgataggcaatatcataaaataggtcaaccagttgccattgacagacagcctgcatcgcctcaagttcaaaaagtggactaaaagtgatttgatgatgaacaagaaaaagtttttaagccttggtcgttggccggggcttttttctgtaaatgacaaagaatagtcaaagatggcattagatatcataccaaaattattgctatactatgtcactatgttttttaatattaaatcaatctatcggaataaaaatcatgactttgcaatcacctaatgattttgatcaagctggtaaaacttcccacatgcaacgctttttaaaaggtgttgagtggttggggaatttattgccccatcctgtggttttatttatttggatgtcggtcattttactgggattatcagccatcttatctgccatggatgttgctgtcattgacccacgccctgagggtgccaaaggtcgtgctgaagatggcatgatttatgttgtcaatttgctcaatggcgaaggcttggcaaaaattgttgaaaatttagtcaaaaattttacagggtttgtgcctttgggtaccgtgctggtggccttactgggtgtgggtattgctgagtattctggaatgatttcagcggcactgcgtggcatggttatgaatgcccccaaaaaaatagtcactttagtcgtggtatttgctggtattatgtcaaatactgccgctgagcttggctatgtggtactaattccattggctgccatgatttttcatgctttaggaagacaccctttggcaggtttggctgctgcttttgcaggtgtttcaggcggttatagtgccaatttactgcttggtacggtcgatccattattatcaggtattagccaagaagctgcccgtatcattgacccaaattatatggttggtgcagaagccaattggtattttatggtagtcagtacttttttaatcagtgccttgggttacttggttactgaaaaaattgttgaacccagtcttggtaaatacaacccccatgatgctgatgaccctaccgtgcttgataataaaattgagcagttaaatgcccttgagaaaaaaggtctggtttgggcgggggtaagtatgctgattttttgtttactgttggcatggacggttgtaccagaaaatggtattttaagacatcctgaaacaggactgatcgcagggtcgccatttttacatggtattgttgtatttatttttgtattttttgccatccctggctatatctatggcaaagtgactggcagtattaaaacaaatcaagatgttgtcaatgcgatgagtcaagcaatgagttcattgagtatgtatattgtgcttgtgttctttgctgcacagtttaccgctttttttaattggtcaaatttaggatcagtaatggcggtgtcaggtgctaattttttaaatgagattggcttaacaggacctttgctactgattggatttattttaatttgtgccttagtgaatttgatgttaggttcagcatcggcacagtgggcgattacggcaccaatttttattccgatgctgatgctaacaggctatgcacctgagatgattcaggctgcttaccgcattggcgacagtacaaccaatatcatcacaccgatgatgagttattttggattaatcatggcagttgcaattcgttataagaaagatacgggtgttggtactttaatggcgatgatgttaccttattcgatgatatttttgttcggttggatgcttttattttatctttgggtatttgtatttggtttacctgtcggtccaggttcggcaacctattatcacatgggctaaatcagaaagactaaaagttatttgaacctaaaaaagagataatttttggttgtaagttagtcattcatttaaaacttattaattttattatttttagttttataaatttaattaaagatatttaaaattatcggtaggctcatgaatcaaattttgagataatagctttgttggagcaagtttggctaaatctcttagcccattaatggtttatattcaagatattaatgatttgatggctattaatcagctgacctagtaagccaactttggtatactaaaattctaaaattcattaacccaccgaataggaaggaaaattatgagtgaaatgaaatgcccttatgaccatacccacttgaccatgagtaatggcgcgcctgttattgacaaccaaaattcaatgaccgcaggtgccagagggccactgcttgcccaagatttatggctcaatgaaaaattagccgactttgcccgtgaggtcattccagaacgccgcatgcacgccaagggttcaggggcatttggcacattcacggtaacccacgacatcacccaatacacccgtgctaagatttttagcgaagtgggcaaaaaaaccgaaatgttcgctcgttttaccaccgtggcaggtgagcggggggcggctgatgcggagcgtgatatccgtggttttgccctaaaattctacaccgaagagggtaattgggacatggtgggtaataacacgcctgttttctttttaagagacccaaaaaaattccctgatttaaataaagcggttaaacgagacccacgcaccaacatgcgttctgccaccaataactgggatttttggacactactgccagaggcgtttcatcaggtgaccattgtcatgagcgaccgtggcattcctaaatcttatcgtcatatgcacggctttggctcgcacacttatagctttatcaatgctgacaatgaacgcttttgggtcaaatttcactttcgcacccaacaaggcattgaaaatctaaccgatgccgaagctgaaatggtggttggtaaagaccgtgagagcaatcagcgtgatttgtttgatgccattgagcgtggcgatttcccaaaatggacaatgtatgtgcaaatcatgccagaaaccgatgcccaaactgtgccttatcacccatttgatttaaccaaagtgtggccaaaaggtgattatccgctcattgaagtgggtgagtttgagttaaataaaaatcctgaaaacttctttttagacgttgaacaatccgcttttgccccaagcaacctagtcccgggcatcagtgtgtcccctgaccgcatgctccaagcacgcctatttaactatgctgatgcgcagcgttatcgtttgggcgtcaatcgtaaccaaattccagtgaatgccccacgctgtcctgtgtactcaaaccaaagagacggacaagggcgagtgggcgataactatggcggtcgtccgcactatgaaccgaacagttttggacaatggcaagaccagccgcatttggctgaaccagcattaaaaattcatggcgatgctaagttttgggattatcgtgagaatgatgatgattattttagccaacccagagccttgtttgagttgatgagcgatgagcaaaaacaggcgttatttggtaatacggctcgtgcgatgggcgatgcccctgattttattaaataccgccatatccgtaattgcgataaatgccaccctgattatgccatgggtgtggccaaagcgttaggccttacggttgaagatgccaaaaatgcgtatgagagcgaccctgctcgccatctgcccagctttttataattcagtgataatcataaaagctgtttagatagaacggcaccccaaaagctaacttttggggtgttttttatggttaagttcaatcatgataaaaaatccgccaataaattgacggattttgtatttaaccaccgaagtcatctaataagatattttcatcttcgacacccagtgatttgagcatactgatgacagcggcattcataactggaggcccacacatatagaattcacaatcttctggtgcagggtgatctttaagatagttttcatataagacattgtggataaagccagtataaccttcccagttatcttcaggctgggggtctgacagtgcgacatgccattcaaagttgtcaaattcttctgccaagccatcataatcttcaacatagaacatttcacgctttgagcgagcaccataccaaaacgagatcttacgagttgattttaggcgttttagctggtcaaaaatgtgcgaacgcataggtgccataccagcaccaccgccgataaagaccatttcggcatcggtatctttggcaaagaattcaccataaggacctgaaacggtaatcttatcgcctggttttaggctgaatacataagatgacatcttacctggtggaatgccttcaggagctcttggcggcggacttgcgatacggatattaaatttaataatacctttttcttctggatagtttgccattgaataggcacgaatgacaggctcatcaactgttgatgtgtaacgccataaattaaaattatcccaatcttcgtgatattctttggcgatgtcaaagtctttataatgtacagtatgaggcggtgcttctagttgcacatagccaccagcacgaaacggtacaacttcaccttcaggaatcttcaaggtcaactctttaatgaatgttgcaacattatcatttgaaataacttcacattcccatttttgtacatcaaaaaattctgggtcaatctcaatcttcatatcttgtttgactgccacttggcatgccaaacgcatattgtcacggatttcaccttgagtaaaatgcccctcttcggtgggcaaaattgaaccgccgccttcagttactttacagcgacattgcccacatgtgccaccgccaccacatgctgaagataaaaatatgccttcgttagcaagggtttgtagtagcttaccacctgcgggagtaaccacatcattatctggattgtcattaatgcggatggtgacatcgccagaactcaccagcttggagcgagccaccaaaatgacagcaaccaagctcatgataataatggtaaacatgataacaccgccaattgcggtaccaaattccatgatactttctcctatctatttatagcgacataccgccaaatgacataaagcccaaggacataagcccaacggtaataaaggtgatgccaagaccacgaagcggtgcaggtacatctgaatatttaagcttttcacgaatccctgcaagtgcagaaatcgctaatgcccatcccaaacctgacccaataccatatacaatagactcaccaaaattataatcacgctcaaccataaacaatacaccacccatgatggcacagttcactgtaatcaagggtaaaaacacccccaaagcgttgtataaagacggtacaaatttatccaaaaacatctctaaaatctgtactgtcgcagcaatcaatgcaatatagcttaataatcccaaaaagcttaaatcaacattaggatagcctgcccatgccaaggcaccgtcttttaataagaattgatacaataagttgttcaatggcacacagattgccatgacggcaattactgcaacacctaaaccaattgccgttgatacttttttagatactgccaaaaaggtacacatgcccaaaaagaaagcaagtgccatattctcaataaatactgaggtgataaataaactgacataatgtcccatcagtgacctcctccgtgtgataagcctttagattgaggtttcatgataaattcagcagcttcttgctggtcttttttccaaagacgaataattgcaataaaacctgcaatcacaaagaatgaagagggcggtagtaacaacaaaccattgggaatataccagccaccttcggtgattttttcaagcaaagtaataccaaaccagctgccattaccaatgacttcacggactgttgccacaaaaatcaatactgctgaataaccaagtccattaccaataccatctaaaaagcttgggatgggtggattgctcatggcaaaggcttcagcacgacccatgacgatacagtttgtgatgattaagccgacaaataccgataatgaacggctgatttcataagcaaaggcttgtaaaatttggtcaaccacgatcaccagtgaagcgataatcaccatttgtacgataatacgaatggatgaggggattttgttacggataatggagataaagaaacttgaaaatgctgtaactaaggttaatgcgatacacatgaccaaagcgtttgcaacacttgtggtaaccgcaagtgctgaacaaatacccaaaatttgtagtgcaattgggttattattaaaaattggtgtcgttaaaatacttttggtatcagccatgattatactccttcacccttgtctgcttgaccagcccttaggttgtccaaaaatggcttataaccatcttcgccaatccagtactgaagtagattattgacaccacggatggtcaaggtagcaccactgatgccatcaatttgactctcacgtgcggtgcctgatttgacaacggcaatttttcttgagccgtcgtcattatacagctctttatccacccatgtggcttgccattgtgcttcttcaatgcgtgaacccaagccaggggtttctttgtgttgataaaaattaacccctttaatggtatttaaatctttatccaaggtcaaaagaccaaaaattggtccccataaaccagcaccatgaatgggcagcacaatttgctcaagctgaccattggtatcttttgccaaatatactttggcaaaatttggtttgcctccaattttggcaatatcatttgttaatgaagtagataggctgggtgtgcgagctgcttttgagacattgtagctattgacatcactgataccagacgccataatttcttgctctgttgcaaattgacctgtttgtagattgaccaagcgtatttcaaaatcagcaaaacgctctgcaatgacatcggctgactctgtttctgggtcgtacatatctgccgccatcaagatatttttattcaaatccagatgggcgttttcttgctgctttggcttaagaccaacagcaaccgcagaaaccatgaccgaacagaccaagcacaaaatcagtgccgtggctgcggtacttacattattattcttggttgacatggcttaatctccgtgcgttttggcgtttgatattagcttgagtgacaaaatagtcaaacagtggggcaaacaagttggcaaacaagatggctaacatgataccctctggaaaagcagggtttgccacacggacagccaccgtcataacaccgataagtagaccgtagcaccagcgaccaatgttagtatgggcagctgaaacagggtcggttgccataaatactgcaccaaacataaagccaccaatcaccaagtgccaatgagcaggtaggctcatcatcacatttttgtctgaaccaaacacattaaacagtaaggcagtaacaaccaaaccaatgactgagcctgcaatcacacgccaagaagcaatgcgagtccaaagaagtccaaccataccaattaagatggcaagtgttgacacttcaccgattgagccttgcatattacccaaaaatgcatccatccaagtgatggtctgaccgtaggcatcgacaaactgatctgggctaacgcctatggcagctagacctaatggcgttgcacccgaaaagccatctatagcggtccaaatggcatcgcctgacatataagcaggatagctaaagtacaaaaatgcccgacctgccaaggcagggttaagaaagtttttgcctgtgccaccaaatacttctttagcaaccacaaccccaaaagtgatgcctaaagctacttgccataacggaatatctggggggagcgagagtgcgaataatactgaagtcacaaagaagccttcattaacttcatgaccacgcacaaccgcaaaaataatctcccaaagaatgccgaccgcaaaagttacggcataaatgggtaaaaattgcatcgccccataaacaaaacttgcccaaatactatttgggtcatagcctgccatattcgtgatgatggtacgccagccttctggtgtaatccccatggcttggatggcacttagtgcctgaaatccgacattatacataccccaaaacatcgctgggaatgtacaaagccaaacggtaatcatgatacgctttaggtcgacgccgtcacgcacatgcgatgcactataagtttgagatgatggctgacgaaagaaagtgtcaaacatctcaaatacagcataatatttttcgtacttgccacctttggtaaaggatggctccatacggtcaaagatattgtgaatgaacttcatggttagccttcctgctcaatacgggtcaagttatcacgcaaaatatcaccgaactcatatttgcctggcgatacgaaagtacacagtgccaaatcttcttcatcaagctcaagtgcacccaattcaaccgcactgatgatatcttcgacaatcaaagcacgcagtagctgggtaggtagatagtcttgaggcatgacagtttcaaataagccgattggtaccatggcacgaggcgagccgttggtactggtcgtaaaatcgtattttttgcctttaaaaaactgtgaaatataaattggcaattttgaaaaacgatttgcccctggtgtaaaaaagtgaagtgcagggcgttcacgaccttcggtaagtacagagacttgattatgaaagcggcccaaaaatgccgtagcaccaacagctgtgcgacctgatagaacagagcctgaaatgacacggttatcgtcgccgttgagttcaccttgggtcaattcggtcaaatcagcacctcgagtggtacgcaccaagcgaggattggccactgctggacctgccaaactgatcagacgctctgtgtaaatgcgacctgtggtaaatagcttaccaatggcgatgacatcttgataattaatcgtccaaactaagctgcctcgtgccaaagggtgtaaaaagtgaatgtgcgtacctgcgttgcctgctggatgtacaccagtaaacccttcatagatggtatcgttaccgtcagcggttttacttaaggtctcaggtacaatatcaccatgacagacataggtttttggggatagcgttgataaaattgccaagccatcattaaatgcttgtatttcttcaaataatacggtggcagggtcaacagccaaaggattggtatctgttgccgtcacaaaaatggcagaaggtatgctattaatttctggtgtacggctaaaaggacgagtgcgtagggcggtccattcacctgaagcgaccaactgctcaacaactgtcttgcgatccagcattgacaaatcttcagagcgataagcattaaaagtgatttcttcacttgcatttggatcgacggcgatgaccaagctttcaaatactcgtcgttcgccacgattgacagcaacgacagtgccgccaactggtgctgtataaaggacgcctgctcgttttttgtcttcgtaaagcacctgtcctttggtgaccttatcaccttctttgacatgcatggtcggacgcatgccgacataatcgtagccgactaacgccaccttagtgggcgtgtgctcgctaatctgcttggagggctcgccagtgattggcagatccaagccttttttgatggtaatcataagcggatacttaaattaagaccaaaacataccagccttcaccaagtggtgattaattggctggacaccaagtttcctaaaaacatccaaagccgtgcgaccgatgagtggcgggctgattttgtctaaaggagtcagtatgaaactttgatgaactttgaaaaaaattggcaactgactttattgctcaattcttgccaaaaaaacgattgttcacaccattaatctaacaattatacgctaaaacgctcaaaatttacagtcttaaagacaatttctatggcaaaaattcatgaaaatatttgaaaaatcaatgaatgacagtcaaaaagatgaaacatttacccaatgaattaagtggtattttgattgaataagttgcctaatcatcaagatatcgctcgctatttttgagtaatgccacctcattttgaataaaaactggcaaattgtccatgaaaaatcagtcaataactgctaaaataccttccttaatttgacacaattttaaggaaaattcagatgtctatgctgattatacccgccattgacctcaaagatggtcaatgtgttcgtctcaagcaaggtcgcatggaagatgatacggtttttgggagtgatcctgttgcaatggcaagccaatgggtcgcccaaggtgcacgccgtctgcacttagtggatttaaatggtgcatttgatggcgtacctgtgcataaagatgtggtgactgccattgccaaagcacatccgcagttgcccattcagcttggtggtggcgtgcgtagtcttagcaccattgagcattatttggcagctgggctagacttcatcatcattggtactaaagcggttgaagcacctgaatttgtagaagaggcgtgtcgtgaatttgcagggcatattattgtaggtattgatgccaaagatggtatggtggcaacgcatggctgggctaatgttactgatatcaaggcaaccgagcttgccaagcgttttgctaatgctggcgtgtcaagtatcgtctataccgatatcgccaaagatggcatgatgcagggtgtgaatatcgaacagacggttgagttggctagctttagtggtctgccagtcatcgcatctggcggcgtaaccaatcttgatgacatcgtggcactcaagccatatggcgattatctgttgggtgcgattacgggtcgtgcgatttatgaagggacattgaatttgtcggtagcacaagcactcttggatgcgtaatttgatgacttacactaccctgaatatgatttttcagggtagtttttgatttgtcaatgcccttggtgtgtttgattggctgttaagcttgcccaaatgcacagcaggcaagctttgaatgattttgatcagattattttgacttatttgattttcggcgatgctttttagacctctcatttttggtatctgatttgtcattggtaggcttagagggtatcatttggctgtcgccatttttgtcaatacgatttaattgctcaattaagcaaaaatcaatttgtaataaatccatattgacgccagcaacttgaataataagcccatcacccaagccaaatcttgagcctcgttcaccaataagcttttgttcacgctcatcgtaagtaaaatattcatcacccagttgtgagatgtgaattaatccttcaataaacaacgcatccagcgtcacaaataagccaaaattggtcactgtggttaccgttgcattaaactcatcgccaatatgtcgctgcatataatgacattttagccaagtttcaacatcacgagcagcctcttcagcacgccgttctgtcaaactggtttgctcgcctgcatcatctaaagagcgataaatgggtgttgcaggtttttggtgagtcaccttatctttgatggcacgatgtagcatcaaatcagggtaacggcggattgggctggtaaaatgactatattcatcataagccaagccaaaatgcccaatattatcagggctataatttgcttgcatcattgagcgtaacaacatactatgaatactgatggcatcaggtcggtcggcagtggctttgataattctttgatagtcttcatgcgttggtgcttcactcggaaagcttagcccaaaacttttaacatattcatgtagccgtgctgatttttcatcattaggcttatcatgattgcggtataaaacgggtaattcatgtttgagcgaaaaattggcagcacaagtattggcaagtagcatcatctcctcgatgagcttatgtgcatcgcctcgggtgcgtgccacaatatcgatgatatctccttgtttgtcaaacttaatgtaagtttctgcggtttcaaatgccatcgcaccacgattttcacggcgtgcatcgagtaccaaataaagctggtgtaaggtatcgatggattttagcactgcactattacgcaccagttcatcaggtagggtttcattggttgggtcattgaaataggcattgacttgattataggtcaatctggcttgtgagtgcatgatggcaggataaaattcataacctgtcactttacccgcccgtgataatttaatatcagccaccatacataagcggtctaccttgggattgagtgaacataaaccatttgataatgcctctggcagcattggaatcacacggtgaggaaaataaacagaggttcctcgtgcataagcatcttggtcaagtgctgattgcggtgtgacataatgactgacatcagcgatggcaacaacaacacgataattaccgccagcgcgtttttcagcataaactgcatcatcaaaatcacgagagtcttccccatcaatagtaatcaggggcagatgacgcaaatccacacgatttttaaagtctgcatcggttggctcgtcaaactttgaggcttgtgttaaagcggcttggctaaattcatgtggaataccataattatacagtgtggtttcaataattaattcacggtcgtttaagctggttaaaagctcagtaattttaccagtagcaaattcttgataagtgggtaaatcaatcaaggaaaccttcacatcatcaccaacggctgcattcattgtttggacattctcagcggtgacagtaataggctgatgggcattagcacctgataattgtacaaaataaccctcatcatccaagcttaatttaccgataaactcaagttggctctgtttaatcacttgaataatgcgtgcttcagtcttgccacgatactctgttgctaccgcttcaacggtatcaccatcaaacacaagacgcatctgcttttcgtgtaaaaataaatctggcatatcgtcaagtataacaaaaccaaaacctttgggattgcaagaaacttgacctgttaatatggttggcaatggtgcgatgctaaaatggatgccatcgatacgctcaagttgcccatcacggagcatggccttaaggcggttggtgagagcaaaaaatttatcttcatcatccaaaaacccaaagtgtatggcaagcgtttcttgcgtggcaggcttgccttgattggtgatatccgccacggtttgtagaatcaataggcgtgagggaatggggttttgatattttgatgcttcaatatcagcattggggtcattccatttggttttttttgttgtttgagtcatcgctgggctacctaactgcttatacctaatatttttttaaattgactattgcataaattgtctttattgtatcataaagctaaaagttatgtgcgttatctgtgttttggagtgtggctgtgaattatttggctatcaaaaaatcagaactttctgagagtgattttaactatctgtgtcaaaagattgcggagattgagcagcttgttatgcatggcgatgcttggcatgcacaagcaattgcagagatgatgggtcaatttggtacacaaatgttaatacagacagatcatagcaaaacagataatagcaaatctgatattgattggagaatgatgacgattaagggatattgtatttatcagcgtgtctttgaaaatagtgagctacatcgtattggcactcatccaaattttcaaagacaaggggtcgccactcagctaatgactgggttgattgctgaggtgatgcatgccaaatgccaacaactgttattggaggtacgcagtgataataccaccgctattacgctttatcaaagcttaggatttttacgatttggtgtgcgtaaaaactattatcgttttggtaatcaaagtatagatgcactaatcatgcgtttgggtttttttgaagataccaaccatcatgtttagcgtgataaccagtcttttaatgagatttagtatcgaagcttcaacactccgatactatggtgatcaattctgtgtctgatggtatgcctattttttcttggcaggacctaacagcatgcccatttggcggccttctaccttaggagcttgctcaacgatggcaatctcagcggtatcttcgatgatgcgatcaagttgagctttaccaatttcttggtgggccatttcacggccacggaagcgaatactgattttgactttgtctttattttctagaaattcaacaattttacgcaatttgacttgatagtcagcttcttcagtaccgggacgcagtttaatttcacggacttgagtctgcttttgattctttttggcttctttagctttttgtttttgttcgtacaaatagcgtttataatccataattttgcagacaggcggttttgcatcagcaacaatctcaaccaaatccaaatttacatccaaagcagcttttagggcagtttgaatgtctaccacgcccatttgttcgccatcttctttgactaagcgaacttctttggcacggatttcttcattgatgtttaaacggtttgacggtttaatgggtcatactccaaataaaaagatagacccttattttacttaaaaatgacagggatttcaagagatttttaatgtctgacttcaacaaccaacctttgtcttgccaattcattgattaactcatcaagatggcttttgttgatgccatccaaatttgcgtcccattcatcaagaatgatgacatcaatatcgcttatattgttattaatttgcattaattgagatgataatttttgacctgtggactttttatgattttgatgaaaaaataaatcatggctgacaggcaaataaaaagccctatttgataataatgtttttaaatacaacaaaaaactgcttttacctgccccattacgccctttaatcgtcattctaccattttttggcaaatgatttaaatcaaaatcactcaatggcatgttattaacaaaaatctctttaaagttaattctgcttaatatgtcaatatcaggcatatttaacgaattttgcaaaccaataaatctggctttaatgccagaaaaattggtttggtggaaaacaagtacctgccccatttgcaatagctgtatttgtcttggtaatgttgcaaccaacaatgataaaaatacataatcattgtggtgtttgataaataaataaacaatcaagcccaatacaggaatcataaacaaaatcataccaaaactagaaattaattgattgaatgattggctgtgaatatgatatttttttgagcggttaaaattctttttataaatacggttaaaaatacccatattatattgattaaaaataatcacattgtcccaaattttatttaaaatagaaataaaatatattctggatttttgagatatttttgacatcttagatatttgatttttatggtaaaaaataaaaaattccaccaataaaaatccaacagcatatgccactaataaatcataatcaagaaaaaatcccaagactaagatgttaatcaataaatttaaaatcagtgccacaccatcaaatgcaaagtccagcatgtcatctatcactgatttactctcttgactaacaaaaacggtgctttggtctttgagttctttattattcagcaagacagttttgccaaaaaaagttgtcgtaaatttttgcacataattatttagtaggtcaaattttgatttttctaaataaatggtggcaaaataagcagggacataaacaatgattaacgataaaacaaaaccagataaatttagcaaaaaatcatcatttttagcaatatctatggcaagattggcaataaaataggtagataggccaacaattaactgctgtcctatcaaaaatgcaaatgagatacataatgatgaagtgatgattttcatgatattcataaagataaatggcaagataaatggaaagacaaatggattgtcaacaaaataatttcgttaaacatggttttaaaaaatccattcaatgttttgaatggatttttcttaataaacttattctgtttacaaatttagccgaccttttttctcaatcgccttatctaaaacagcgataaagtcatcaagactcatactgcctaagttttcgcccgcgcgagtacgcacattgaccgtgccagactccacttctttatcacccaaaatcagcatgaacggaatgcgttctaaggtgcgttcacggattttaaagccaattttttcgttacgcaaatcactgatggcacgatagcctttggcatttagcttgctaaccacatcgcccacgctgtcagcttgcttgtcggtgatgttcatcacaaccacttgctggggggcaagccacgcagggaagagacctgcataatgttcaatcaaaatgccaatgaagcgttcaaatgaccccaaaatcgcacggtggagcatgacagggcgttcacgctcgcctgattctcccacaaactcagcgtccaagcgttcaggtaggttaaagtccaactgtaatgtgccacattgccaaacccgtccgatgcaatcttgtaggctaaactcaatcttaggaccataaaacgccccttcgcctgcttgtagctcccagtcaagcccagcgttatctaaggcgtcggctagggcttgttctgccaagtcccacaactcgtccgcccccacccgtttttctgggcgagtggacagcttcatttgaatgtggtcaaatccaaagtctttatacacatcaagggtaagtttgataaaattaagggcttcttgcctgatttgggcattggtgcaaaagatgtgggcatcgtcttgggtaaagccacgcacacgcatgatgccatgcaaagaccctgatggctcgttgcggtggcatgagccaaactcagccaagcgtaggggcaaatcacggtaggattttaagccttgattaaacacctgcacatgacaagggcagttcatcggtttgatggcgtaatctcgtttttcgctggcggtggtgaacatcatctcgccatagttatcccaatgccctgatttttcccataagcttctgtccacaatttgcggggttttgatttcaagatagccgttgtctttttgtacttttcgcatatattgttcaagtacttgccagattgtccagccattggggtgccaaaacaccatgccgggggcttgctcttgcatgtgaaataagttcaaggctttaccgattttgcgatggtctcgcttttcggcttcttctaggcgttgtaagtaggctttaagctgttttttgtccgcccatgctgtgccatagatgcgttgcaattgttcgtttttggcgtcgccacgccagtacgcaccgctcattttggtgagtttaaacgcctttaaaaagcgagtgttgggcacatgtgggcctcggcacatgtcaatgtattcttgatggtgatacaagcccatgtgggtttcatcaggcatgtcctccaccaagcgaagtttataagtctcaccacgctccaaaaaggttttgatgacttcatctcgtggggtcatttttttgatgacatcataatcttggttgatgagttgtatcatgcgagcttcaatctttgccatgtcaccaagggtaaaagggcgttcgctataaatgtcgtaataaaagccatcatcaatgacaggcccgatgaccattttaacatcagggtagagctgtttgaccgcatgacctaaaaggtgggcggttgaatgacggataatctccacgcctgcatcatcttttggggtgattatctctaccgtggcatcggtggtgatggggtcgctggcatcgaccaaccgaccattcacccgacctgccacggtggccttggcaagcccagcaccgatactttgagccacttgcatcacggtggtgttaccgtcaaattgtttgatactaccatcaggtagggtaattgcgaccataatattgccttagtaccttgattaaaaatctatttattaagaatatgtttgttgattgatattctcaccgccaaacaaactgattaaaattaatttataatatctttaaattaattttcaaaaatgatagacatcatttgtaaaaaacttaaattaaaagagtataaaatactggattataacaaagttttttattggtggcgataactaaatgagcgtataatatgaattttgagacatcataagtaattttataaaatattttgcttctggcaattatgctggcgtacatccaaccatcgtgctggtctaataaaactgggtcagcgttggagcattcccaatattgcattaccaaaataacctttaaggagtaattttatgcatcgtatttctcttgggtattttacagaaactgatacagataagctacacgctgcttttgatattgatggagaatttatgagagttcttgctaaagattatttagaagatggatgtgtggaaatgtacacgaaacaagatagttcttggttttttgatagctacattgctttacaaaataattttccctttgatataagtatggaaattcttgaaaaaataaatatagatcaagtctttggtgtattttgggttaattatgaaaaagatcttgtctacaaaaaagagaaatactaattgttgttgatgatttttatattgaaaaatttccatgggaaggttaataggcgctaaaagcttataaatatagccttgattgcaatgaaaaccttatatttttacagtattttattgggtttcttattaaaaatatttttataaaagtcttatttttgataatttaatttatctcaaatataaactaaaataaataaaaatggcaatatctccaaactaagattactgcttattatggttagatatagaaactgccacttcttttgcttaaatagccacaatagccaccacaaaacaggcattatatgaacaagaaatagcaattattcaaggcggagctcttagaattgggggtgcgtgctcttctttgtattcaagttccccaatgtcaaacacctcatccattggaaaaataaataactattttaaaaaataaagtaaaagactataaaaaagagcatctaagcgttttaggtcaagttaatccagcttatctagaagaccaggtagcaaatggtggagctttgatttatattggtaaattaactgtaaaaacattaggtaaatttgcaaacaaatctcaagccaagacaacatccaaaaccacctgaactaaaagcagatcctgccccaccgcaggcacactcattcacaccatccatggtctaaaacccattgaaaccattgaacatggtgatttaatttggtcaagacaagagtttggcacagaatatggctaccgtcctgtcatcgctactaaggtcacgcccaatcaagaaatctatgaagttgttgtcaagcacagcaataactccacagaaacctttaaaaccactaaagaacacccattttgggtagaaggcattggctggcttaaagcttctttactagaacaaggcatgatactgcttgatagaaacaatcaagaagtagaagttataagtcaatacctactacccaaccaccccaaactgtctataactttgaagtacaagacttccacacctaccatattggcgagtttggggtgtgggtgcataatgatgggtgttgtggggtagccctttctacgcttgaatcatatgttgagaaatcagcaaggggtatgggaaagttgcatcgtgttaatgaaaatgagttaacacagttaattttagatattggctacaataaagatgaattattaaaagccaaatccatattggaatacagtattaaaatcaggaaggcagaaaaggcaagccaaccaggtgggaggattagatgctggtcatcaaagaagggttgatatggaacaaagaatacttaataaaatcaataatatgctaagggagttggaataaatgcataaaaaaatagataaacacctgatccaggttctgtcatctgaatatgaatttaattctgattcatatgctgatttaattaataattcaataagcatagaacaatcaacagacgcttgttactttttaggtgaaatgtcaaaatctaatgtttttaataacagttaaccaatctaaaatatagatattgctcatgagttggtcaaatggtctaattttaggctgattttttgaaaaaatgggggttttagtaattaatccaccaaacccccaacaaaatcaatcacttaccaactttctaccatcaatcctaaaaaactgctttacaagtcatgatatcatgcctataatacgcaccacttaagcagtacagcacagtaaaaaacattgctaaatcaatcacttagtatttagtataccgtttactggagcaccaaaaacttaaaaaataaattttaaatttttgaaaaaagtgcttgact

SEQ ID NO: 36 - DNA, 92407 bp, Moraxella catarrhalis
gcttttggatgccacaaaaggtgatatttatgtcttatgtggcggcggtactaaggcacaaaaagcagcaaagctcatcaatgagctggataatgaccgtcgtatcattcatttaactggtggtacccgaggggcaatcgccagtggcatggcgattatttctgagcaaccgttagaaagaaattaatattttttatcttaacatcaataagctatagattttatggtttattttataaattagtggttgacagcttggagccttagttgtattatacgcaccacaacgacgagctgataaagaagcttgaagtgataaaatcggagtgtagcgcagcttggtagcgcatctgctttgggagcagagggtcgggggttcgaatccctccactccgaccatttaaagcctgataagcttttttgttggcattgtcaacacattaagacactcgagcgcctgtagctcagttggatagagcatctgccttctaagcaggtggtcgcaggttcgaatcctgccaggcgcgccatatgcctgcattactatggcggctatagctcagttggtagagccccgggttgtgatctcggttgtcgtgggttcgagccccattagtcgccccatttttcaaaatcccatcaataaattattgatgggattttttgtttgttgccatagttgaaattatagggtgaatgattgtcataaaaaggtctttactgtacaatatttggcgtatttcatatttcatgatgatgaaccaatcaaagcatgaataatactgaattttagatgttatgagggtaatatgttggatcaattgattattggcagtagaagttttaattcgcgtttgttggttggtacaggcaaatataaagacctaaatgaaaccaaagatgctatccatgccagtggtgccaatattgttacggttgccattcgccgaactaatattggacaaaataaagatgagccaaatcttttggatgtgatttcaccgaataaatataccattttaccaaatactgcagggtgctttgatgccgatagtgcggtgcgtacttgcatgttggcacgagagctgcttgatggccataatttggttaagcttgaagtgcttggtgatgaaaaaaacctttatccaaatgtcaccgaaacactaaaagcagcaaaggtattgattgatgatggttttgaggtcatggtctatacttcagatgacccaattgttgccaaagagcttgaaagcatgggctgtgtggcaattatgccattgggtagcttgattggctcagggcttgggattttaaaccgccacactctaagcttaattattgagcaaaccaaagtacctgttttggtcgatgcaggcgtaggtacagcatcagacgctgcaatagcgatggagcttggttgtgatggtgttttaatgaatactgccatcgcccatgccaaaaatccagtgatgatggcttcggcgatgaaccatgcagttgtcgcaggtcgagaagcgtttttggcagggcgtatgcctgcacgccatatggcacaagcaagctcaccgcagacagggtacttttttaaatagccagatggtatcttaaattgagcggttgtcgcttgatttgggaaatgcttaatggtgtcaaaaataaaatttgaggacttatcattaacccaaaattttgttatcatagaaaattttgggtgattttaggttaagggaacttggattatgcgtgcgctgagcattgtggattcactatttttatggctagaaaataccaaacaacccatgcatgtggctggcatttgtgtatttgagttacccaacgatcaagatgaggtgagctttatcaatgtgcttgccaaccaaattgactctgatgctattcctaatttcccatttaatcaagtgcttttccatcaatttgcttggaaaaccattcgcaaatttcatatagaccgtcattgttatcggcacagcctacaggctggcaaaatgtcggaggcactcgctcaaatctcaagactgcatgaacagcaattggatcgcaccagaccattatgggagctgcatttatttgataatcttgagccagaaacgcaaaacggcactcggcgatttttattgtacctaaaagctcatcatgccatgatagatggcgttgctgcaatgcgtttatttcagcgttcgctatcgcactcacctgatgaaaagctgtctaaaccaatttggcttcgtaatattcgccgcaaagaatcaagctttgtcatggataaaaagccaatcgttgagcattttaaagaccaaattgcaggtctaaagccagtatatcaagagcttaaatctgattatcagcttagccagtccaccgcatcccaaacaccaaaaacgcagtttatcagcagtttgcaagctccgtcatcaatacttaatcaacgcattggtaccagtcggcatatctgtgttctgaccttaaaaaaagcacggtttgtccaagttgcaaaacggctcaatgtcagtaccaatgatataattttggcagtttgttccactgccatcagaaactacctattatctcaaaatgctttgccagatatgccattgattgcttttgtgccgatttctttacgaaaaaatgatactgcgttgggcaatcaaatctcatttattccaaccaatttgggtacaaataaccctgatgccatcgcacgccttaggttgattcatgacagtgtgcaagcaggcaagatgcgcgctgggcgtatgacacaagctgaatttatcaattatacggcagtgcattatgcttgggcagggataaatttggcaatgcgtctttatccagctaagcaggcattcaacctaatcatctccaatatcccaggtgacagtacgcctttgtatttaaatggggcgaagctgacagccatgtatcctgcttcggttttatttgatggtcaagcactcaatatcagctttaccaattatcaagattgcattgactttgggattacggcatgccaaacagccctaccaaatattcaatcattaccatcattgctaacacaagcacttgtcgagtatgaaggcaatgattatagtagcaatcaagtataaaaactggtcaaagacgagtttaaccagtttttatgagtttgatttgtcttgataaagttaagccaaaaccgctccgatgggcatggtgtcaggcagtgtgatgactgttaataccccttgtttttcagctgataaaatcataccctctgagataccaaacttcatcttgcgaggtgctaagttggttacacaaatcacttttttatcggtcagctcttcaggttgataaaacttggcaataccgctaaatacattgcgagtatgctcctcgcccacatctaaagtaaactgtaggagcttatcggcaccttcaacactttggcatttgaccacatgggcaactttcatagtcactttggcaaactcatcaataccaatgtatgccgatttggcggtatccgtatcatccaaaactgtttttttggtgttatcagtgcctgaggtttgggtaagattttctttagagtcatgaatcatcgcattaactttatctttatctatacgctgcattaatggtgtaaaggggttgatgtgatggctgagtaaatggcgatggcgtgtatcaaactccaagctgtcaatatttaaaaattcacgggcttgttcggataattttggtaaaatgggtgcaagataaatgatcagtttatgaaaaatatttagcgaaaccgtgcaaaccttttgaacttcatcaaatttacctgctttatttaatgcccatggtttttgggtatcgatatactcattggctttgtcagcacaggccataatgagacgggtgaccttggcaaactcacgcgcctcataagcggcagcaatctcatcacctgcacagataatctcatcaatcagtttgggttcggtcaattcatctgataatttaccatcatgatttttgtgaataaatcctgctgagcgagaggcaatattaaccactttaccaaccaaatctgaattgactttttgcataaaatcttcaagatcaaggttaatatcctcgacatttgctgacagtttgctggcaaagtaatagcgtaaatattcaggatctaaatgcgtcaaataggtttctgccttgatgaatgtgccacgagatttactcattttttcaccattgacggtcaaaaatccatgtgcattaaccgctgttggggtgcgatagcctgcaccttcaagcatggctggccaaaacagtgaatgaaaatatacgatatctttaccgataaaatgatatagctcagtttgactgtctttattaaaatattcatcaaaatccatatcggtacggtcgcacagatttttaaagcttgccatataaccaacaggggcatctagccaaacataaaaatatttatcaggctcatctgcaggtgtatctggaatcttaaagccaaaatatggtgcatcacgactgatatcccaaggtgcaagacctgcgtcaaaccattcagatagcttattatagatgctgctttgaagtcgtccttgagactttgtccaagtccttaaaaattcatcaaactgcggtaaattgaaaaaatagtgcttagatgatcgaatgatgggtgatgagtttgagagtgttgaataagggttttttagttcggtggcattgtaggtgctagagcagacttcgcaattatcgccgtattgattgggtgcgtcgcattcaggacaagtgcctttgacaaaacggtcagccaaaaaaagccctttttcagtatcaaacagctgttccacatctttggtaaaaatataaccattttgcttgagtgtggtgtaaattttttgggaaaaatattgattttcggagctgtgggtagagtggtaattatcaaaatcaatcaaaaatcctgcaaaatccttttcatgacttgccttaacggtagcaatttgttcttctggggtgatgccattgtcttgtgcttttagcatgattgcggtgccatgtgcatcatcggcacacacataagtcacattatgccccatggctttcatggcacgcacccaaatgtcagtttggatgtattcaaccaaatgccccaaatgaatgggtccgttggcataaggtagggcagaggttaccaaaattttacggcttgttgtcataaaaatcccattaaaaaattgctataaaaatggtctcattatagcataatcgtatcaaaatagctcaatcgtgcatcaactcaatcaaaactcagtttgatgataaaagacattaagcatctggcatggtaatctttaagatgccagtatgtatgctaaagttactttactgaaagttaaggccatttgatgatggtttggtttgttttttttttggtaaaaatgttttgataaatttactgaatttaacagcaaaatttgttatgatggcagtttttatagtgatgtttggaaaataaaaccatgagtgcattacgccagacccaatcgcagttacagctttatgataccctaagtgccagcaagcgtccatttaaaccgattcatgcagggcaaattgggatttatgtgtgtggtatgacagtttatgactactgtcatatgggtcatgcgcgtgtcatggtggggtttgatgtgattgtacgctggcttagagccattggctatcaggttaattatgtacgaaatattacggatattgacgataaaattattcaaagagcctacgataacggcgagaccattaccgagctgaccgaccgcttcatcacagctatgcatcaagatgaacaatttttgggttgtcaatctcccaacatagaacctcgtgcgaccgaacatattgaaaatatgcagcatctgattgatgttttgctgacaaaaaacttggcctatcaaggcagtggcggcgatgtgtattatgcaatcgaaaaatttcctaattatggcaagctctccaagcgtcatgtagatgatatgcaagcaggtgcatcagagcgtgtgagtaccgcagaagataaacgccatccttttgattttgtattatggaaaaccgccaagccgtctgaaccacattggcaatcgccgtggggtttgggtcgacctggttggcatattgaatgtagtgccatgagtacttgctgtttgggcgaaacttttgacattcatggcggtgggcatgatctgcagtttccacatcacgaaaatgagattgcccaatctgaaggtgcaactggtaaaacctatgccaatcattggatgcatatggggtttattaatattgatggcgaaaaaatgagcaagtctttgggtaattttttcaccattcgtgaggttgtggataagtttcatcctgaaacgatacggttttttttattatccagtcattatcgcagtcctgttaatttttcagatacagcactcaaagaaagtcataccgcattatcacgcatctaccaatcactaaaatcggccgaaaactttggcgtcatatcaatcatgccaaatgcttgggagagtgaagcagggcaggcatttgccaaagcgatgaatgatgattttaatacccccaaagcggtgagcgtgctttttagcgttgttactgagattaatcgagccatgaaagcaggcgaataccaaaaagccactcaagaagcatcgacgctcaagacgctggcctcggtgcttaatatcgcccaatcatcgccccatgagtttttgcaagccaatattggtaataagcctgatggcttaagtgatgccgagattgccaataaaatcgcccaaagacaacaagccaaagctcaaaaaaactttgccaaggcagatgcgatccgtgatgagcttaaccgtcaaggcattgagcttgaagatggtcgtatgggtacgacttggcgacggatataaggcataagcgttttaaagggtaatttgctctttaccaaattacccttgtcattgtgccaaaaatacccataataaaggctgattttatatatgagaacgctcttatgaaaatgttgatatggtcgctgatggttttgggtttggtcgtggcatcaaatgcgtatgctgatatcgaaaaaatatacgctcaaagctgtgcaacttgtcatgatagcggtacttttaatgcacccaaaaaaggtgatgttgccatatggcatcgcctaaatcagcaaaagggtcaagaggcattgattaaatcaatccgccaaggcatgccgcagatgcctgccatgggtctgtgccaaaattgcacagatgaagactttgctaagctgattgactatatgagcagataaattaaatgataaaaatcggtctgcttggctgtgatcaaaatgtcattcataccatcattttatcaataaaatgacgattatttgaaaaaatgttaccaaaaccacaatttttgtaggaaaatttagctaactcttgctataataacaaaagttactcagataaattgccataagtagttttttgaattataaatgatgggctaaataaaccaagatttagccacaatatcacccaagacttagccaagttagtaggaaattattatgaaacctgccaaaaaagcaactttagccaaactcactctagcctcaggaattggtcttgccagtttttcagcgtatgctgctgtcactgtcccgacatatgacattgaagcaggcaaagccatcgttgaagccaactgtgctgcctgtcatggtcttgatggcatgagtcctgtgcctactcagccaaacctcggtggtcaaaatatcaagtatctttataagcagttggttgattttaagaccaaagcacgccgtaatggtattatggaagctcagctggctggattgactcagcaggatttggcaaatttggcaggttattatgccagtagaaccccttggacaccaggctatggcaataaagcaacagttgccgaagcaaccaaactatacttaggcggtgataaaactcgtggcgttattccgtgttcaggttgtcatgatcccaaaggtgcaggtaatgcgtacgcaggctttcctcgcttaggtggtcagcacgctgcctatttggcaacacaattaaaactgttccgtgccgcaggtcgtgaagatgatgtttcgtcagatacagaggtgcgtaccaacgattctgccaaggcaggtgataaaggcatgatgcagatggtggcatcacgattatcagatcgtgatattaagattttatctgaatatttatcagcacttcactgatacacgaggcgatgatatacatcaagctgcttaagtcttaaatatgatgattaaaacacaaacataacaacgatacgatagccatatactttagatttgatggtcggtataacaagtgtatcagaaaatctaccattatatctattattgtattaaaaatattgtattaaaaagctcccaaaaagggggttttttaatgtatggcagttttagggctttattggtttttgtgttaaaatatgccaaatctttatcatggtatcaaatatgcttcatcgatatacggtcttttttgtggcgtgtgctttgcctttgatgttcattggtcaagttgcaccaaatatggcacgagaattggatttttggctgctttgggtggcagcgatggttttggttggcttgcctgtcttatttgctgaatttgccttgtcggcgcgttcaggtgatatgccgtggcagggtatgcaaaaactgacccgtgaagcagatgcaggcttagtttggcgaggttttgcgctgctgtctgttgttatctcaatattaatcgcagccaatctctcagggcagattgctataagagcttatgtacactttggttcggtgttacagcagtcaggtattcccatatttggtatggcagcaggcttgatggtcattgcattgatattaagcttattaaaaagtcgtttgctgatggtgggcgtcttgttgattttattgggttcactgttgtcgttatatgacagtgcggttagcgttcctgtcatgaccgaggttggactgcttgagtggtctcgtgcagtcatacttgcacttttgtgcgttggtattggtacaggcttatactggtttgggggtatggcgaccgcaccaagtttgatgactgccaaaaaatctttggcaggctatattttgcctgtttggctcactcagctaatctttggttcaattgccatcttagcaggctcagctttggtaggcgtggcgtcatttgtcgttaccagcctaggcatgttattggttgcggcatttttattatattatgcgtacacacagcttagtacacgctttggcatactgatggcggtggcgatggtattattattggcgattgtgtttagtattattcctgccaatattttattaatcatcattatctgtctaagcttggtggcggttttgatgttgtctattttttcaggatttgtgatgaaaattagccatttaagaaaaacgctgaatatgagtagtgagcttcgatataatacttggcgtgtttttgtacgcattattgtgcctattgccattattgtagcaatcatcggtttggtgcttgaatggattgtttagagcaatgtatgaccatcgccatcagccatgttgcgtactcaggtaagcagtattatagtgaacttagcctaccgatgggtacaaccatctatgaagcattgacgcttgtgccttgggtgcatagcgaagagtttgaagatttttggcattgggtacaaaataatttggacaacagcccaaatcataagtcttggtatgtgggtatttttagccaaaaaaaacgccttgataccatacttttggcaggcgatcgcatagaaatctaccgacccttgaccattaatccaatggctaagcgaaaggcactttcaaaaaaatagccaacaaaatcattagtttgatggatattaatcttaaagttttccttacagttctatattaataaaatgcagccagcaattttgactgcattttattaatggtggtacttatcttagatgagattacatcaaagcaggtgagtcggtacggcaatgtagcgtatgttcttgatctgtttcaccaaggatgacggataataaagcctcagagcctttggcatgccaatcatagacactgtttggattggtgtcattaacaaaacgcatgcctgatgctctaacagctggacgcatcacgatctcttggttgtgtaggtgccaagttggtgcgctgacggtcaatactgcacgatcattttctggttgatagtttgccacaactttggcaccttcatcacattgataaaccgctgtgatgtcttgcccataaacgccatgttggtgttgggtaccatgatgatgagtaccagctgttggcacaacaacaacgcctgcttgattggctggcacactaacagttgatggtgttgtacagcctgtaattgccatcataacagcagcagaactcaaaagtaattttttcataagttatccttttatttagataaaaagccagaattggtaaattcattataggtcaaatcatgatgggctgagtgatttttgatggctaatctgtgatagtcatgtgaaaaatgttgcttaactctttcttttattgattgttagttgctttggtgcttggtgtgggtcaagatttcgacgcatcaccaaaccaagcttagatgtgtgggcttggtttgataattttggttgttagagcgtgcctgattttgaacaatttacgacggctttactgtttaaataggtattttttatcataactagcaaagataaatataccttatttaaatggattaagcctgagcgtcgtgttgtgtgggaataaacccttcgcctgtatctttggcaaggacgggatggtcagcatttggaatattgcctcgtaaaatcatataaccgatcacgcctgaaatgattgagcctaaaataatccctaggcgtggatcaaaatccttaggagtgttgccaaacgccaagcctgagatgaataaactcatcgtaaaaccaataccacacagcaaagataccccatacaactgcttgatggttgtgccttttggtagggacgctaacccaagctttaaacataaaaagaccgctgccatcacaccgatttgcttgccaatgaataatcctgcggcgatgccaagtgggactgaatgtaataaactgtcaatgcctgttcctgccaacccaatgcctgcattggcaaaagcaaataaaggcagcacgccaaaagcgacagtattgtgtaaatcgtgttcaagctcttctaggggcgaatgctcagggtcgcttttattacgcaaggggataaaaaatgccagcaaaacccctgctaaagtggcatgaacacctgattttaaaaatgccgcccacatgaccaaaccaatcaataaataaggtgtcagtcgcacgacattcattttatttagaatgaacaaaaatggaaaacaaaccccagccaccgccaaagatgataaagataaatcgctggtgtaaaataaagcgatgatgacaattgcaccaaggtcatcaaaaatggcgatagagaccaaaaagacttttaaagcatttggtacacgattgcccaataagcttaatacccccaaggcaaaagcaatatcggtagcggcaggaatcgcccagcctgccaactgttcaggattgctctgattaaaagcagcataaattaacgctggcataatcataccgccaaccgctgccaaggcaggcattaaaatttgtttaacatcagacagctcaccaattaaggcttctctttttaactcaagtccaaccaaaaagaaaaatattgccatcaaaccgtcattaatccaatgatgggcatctttggcaatttgaaatgtgcctatttgaaccacaacaggcgcatgaataaaggcatggtacatctcgtcaagcggtgaattggcaataatcatcgccagtaaagctgccgctgccagtacaataccgcctgcagcttcaagctctaaaaatcgtttgaattgtgcaaacataaacttcccaacttaggtgcgttcagctaacaggatctaaaaaatcagttgaccagttaggatgatttaatttttgttagctgatggcaaaattgataaattagattaatttgggattaactttatcataaaaatatggtaatgataaaggcttgattacaaaatttgagaaattttattttggggtatgccccaaaatagctatgactcaaaattactctgataaaaattgatagtttatttttcagtattttgattaaaatttgcctgaaaacttgtctcatagcgtgattgtgcgtgatgataaaggcgttatcgtgtataatgatggtttttgccaaatgtcagatgaaggttatgactcaattaccaaaaattttattggcggtgacagggggcattgctgcctacaagtctgccatgcttgctcgcctgctgattaaatcaggctgtcaggtgcgtgttatgatgacagcaggggcgtgtgaatttattacacctttgacatttcaagccttgacggggcaagcggtacatactaagctacttgatgagactgccgagcgtggtatgggacatatcacgcttgctaaatgggcggatttggtggttgtcgcacctgcgtctgccaataccatcgcaaaacttgcaggcggttttgctgataatttggtaacaacggtttgccttgcaaccgatgcacccatactcattgcacctgcgatgaatcagcaaatgtgggcaaatgccatcgtccaagataatcttaaaaaattacgccaatttggttatcacatcatgaccccagatagcggtgagcaggcgtgtggtgatgtgggattggggcgcttgcccgaacctgaagacttgtgccagcagattttggcgtttgataagtgccgacatatccagccgtcattattaggtaaaacagttgtcattacagctggtgcaacagttgaaccgattgatcctgtgcgttttttatccaatcactcaacaggcaagatgggttatgctttggcaaatgcgtgttatcatgcaggtgccgatgttattttagtgtcaggtaagcatgtcagtttaaagacaccgtttggggttcgtcgccttgatgtgggtacagcagagcaaatgctaaaggtttgtttgagcgtctgccaaaaggcagatatattcattgcagctgccgcagtggctgattttaaagcggcatcagttgctgaccataaaatcaaaaaaaccaaagaccagcagaccatgacactacaattaattaaaaatccagatgtgcttgccacaatttgtcatacttatcccgatcttatctgcgttggctttgccgcagaaactcaagatgctaacaattgtgccaaaagcaagctggccgccaaacagttggacatgattgcggtgaatgatgtttcggataaaaccataggttttggtagtgaaaataatgcgatgaccgttttttttgccgaacaatacgaccaaatgccccaaaatctacccaaggcacataaatcaaaaattgctgagcaattggtggcatgtgtggtaaaaatcatgaatcaaaaacaatgaatcaaaaaatcatctggcggtatgatgggttcatcatttgtaggcgaatgattttgtcatcatttagaatttagattaaatcatctacatatggtagattttaacgcatttgtcaataaaaaataatgaagtatgattcacaaaaataggttgtcaagtatcggtaagctttgtagggtggtatgatcgtgcatgatgcatcgtgtttgtgtttgaggctttttgtcttttttattacttttgatacaatacatcatcataaataggagtgtttatgactcattattcagactttattacgccagcggatcgtgcttggcaagcaacttatcaaaaaaataagttagacattcaattgaccatgcccaaagaggtatcgtcattacttgatttttttgatgttcattttcgtgccaatcgagggcagcgtggcataacatttatgggcgtacatattggctatgatgagctagatggtattagtcaaaatatcgcaggttatttgcagtctttgggcttaaaaaaaggcgataaagtggcggtgatgatgccaaacacaccgcagtatttggccgtgatgataggcattgtacgagcaggctatatattggtgaatgtcaatccgctgtataccgcacatgagcttgagcatcagctcaatgactcagaagccaaagtgttatttattgtagaaaatttcgcccatacctttgaaaaagtggtgaataaaggtcaaattcaacaagtaatcatcacaggcattggcgatatgatgcgtctaaaaggcttgctaattaatgctgtggtgcgtcatgtcaaaaaaatggtgcctaattattgtatccctaataaaataaaatttaaagatatattaaataaaaaatatccatacactaagccaagtgtcggtttggatgatattgctgtattgcagtacacgggcggtacaacaggtgtggcaaaaggtgcgatgctaacccacggtaatttaattgccaatgtcgagcaatgcacaacttatgtcaaatctggatttgaaaaatcccatcagcatggtgaatatatggcggtcgcgttacctttgtatcatattttttcatttatggtaacgatgcttggcatgaaaatgggctttgcacttttattgattcctaatgcacgagacttagatgatctaaccaagcaatttggcaaatatcgcccacagtttttccctgcggtgaatacattatttaatgctttagcacatcatgatggttttaaatcattagatcatagtaatcttaaggtatcattgggtggcggcatgtcggtattaccaagcacagctgatgcttgggaaaaaataacaggcagctatattatcgagggctatggtttgtctgaaacctcgcctgttttgacctttaatccattgggcagttatacaggtaaaatcggcattccttttccttcaacagacattcttttgttggacgatgaaggtaatcaagttgctcaaggcgaagcaggtgagattgtcgccaaaggccctcaagttatgaaaggctattggaatcagcctgaagagaccgcacgagcgatgacagcggatggttattttcgtacaggtgatattggtgtgatggacgaaaatggttactttaaaatcgttgatcgcaaaaaagacatgattttggtttcaggatttaatgtctatcctaatgaagttgaagaagtgattgcaagccattcaggcgttttggagtgcggtgttattggcgtgcctgatgagcatagcggcgaggtggttaaggcctttatcgttaaaaaagatcctgaattgaccgaagcagatatcaaaacttgggcaaaacaaaatctgacaggctataaacgccccaaaaaaattgcttttttggatgaattacccaagtctaatgtcggtaaaatcttaagaaaagagttaagaaatctttaaattaatacttgagataaatgaatacttgagagtaatatatagcagcggcatcaagcggggttttcttgctttgttgcatgacataagatcacaaagtaaattgtaattttttggtcataattcttgtctaattaggtaacttgtgctagattgacaagcataccatacgctatacatcatgcctcttttttggcttttgatggcttgatttgatataaggaaataaatgaatatgagtaacatgactgattttaccgtttcaacggatgcaccttggtataaaacctatcaagaacatggtcttgattttaactttgatttgcctgacaatatcaattcactcatggatatttttgatcaggcatttgcacgcttcggtaatcaagttgcgtttacttgcatggataaatctatcacctatcgacaactggataactatagtcgtcaaatggcggcatatttacaatcgctaggcttggtcaaaggtgataaagtagcggtcatgatgccaaatattttgcaatatccgattgcgatgattgcgattgtgcgtgctggattgacattggtgaatgtcaaccctttgtatacctcgaatgagcttgaacatcagctcaatgactcagaagctaaagcgttatttattgtagaaaattttgctcatacttttgaaaaagtggttaataaaggtcaagttcgccatgtaattgttgcatctttgggcgatatgcttggcttaaaaggctttttggtcaatgcagtggtgcgtcatgttaaaaaaatggtgcctgaatggaatatccctggtcatgtatcatttaaagacgcactcaacaaagtgccgataggtaactacaatcgccctaatttggctttggatgatattgctgtattgcagtatacaggcggtacaacaggcgtggcaaaaggtgcgatgctcacccatcgtaatcttgcttcaaatgttgagcagtgtgcgccatttcttagcttggtattttctaaagacaatctatctggtcagtatatcgcagttgccttaccgctttaccatattttttcattcacagcgtgtggtttgttggggatgaagatgggttttagtatgttattaattaccaacccaagagattttccagcactgtgtaaagattatgccaaatataagcctgcattttttcctgcagtgaatactttatttaatggtttggtgcatcatgaaggatttcggtcacttgaccatagtaatttaaaattatcattaggcggtggcatgtcagttttatccgatactgccaaagcatgggagcgtttgacgggtaattatatcatcgaaggctatggtttatctgaaacctcgcctgttttgaccctaaatccaccaggtggatacacaggtaagattggtattccaattcctgccaccgacattaaaattttggatgatgagggcaacgagttggcgatgggcgaggctggtgaaatttgtgccaaaggtccacaaatcatggtcggctactggaatcgccttgatgaaaccgaaaaggttatgaccaaagatgggttttttcgtacaggcgatattggtgtgatggatgatcgtggctttattaaaattgttgatcgcaaaaaagatatgattttggtgtctggatttaatgtctatcccaatgaggttgaagatatcattactgcccatccaaaagtcattgaatgtggcgtgattggtgtgcctgatgatcacagtggtgaagtggttaaggtctttgtggtcaaaaaagatccctccttgaccgccgacgaggtgcgtgcttgggcaaaagaaaacctaacaggttacaaacgccccaaatatattgagtttatcagtgagcttcccaaatctaatgttggtaaaattttgcgtaaggaattaagagtacttgagcaaagcaaataacaatcatctgttatgacaattttttaaaaaccgccacaaaaacccgccacagttggtgggtttttggcatttacaataaaacataagatttagccatttttcatgcaaatttcatgcaaaaataattattttatttttataagctgtttaaactatcgatgatgcgataaaggctaagtacacccctaggttaccctgatattttgtaatatcatacataacctgataaaataatgcttacaatcgttaacaaaaatgtatagtgagaaaaattatgcgtagcaacaatcgccaaaataacgagcttcgtcccattcattttatccgccaatataccaaacatgccgaaggttcggtattggtgtgttttggggataccaaagttttgtgtactgccagtatcgaagctggtgtgcctcgttggcttaaaggtcaaggtaagggctggctgaccgctgaatatggtatgttgccacgcgcgacaggtactcgtacacagcgtgaagcagcacggggcaagcaatcaggacgcacccaagagattcagcgtttgattggacgctcactgcgtgccatgcttgacttatcaaaacttggcgaaaataccatttatatcgattgtgatgttatacaggcagatggcggtacacgcacagccagtatcagtggtgctgcggtggcacttattgatgctttagaacacttgcagcgtcgtaaaaagcttacccaagatccgcttttgggcttggtggcagcggtttctgtgggtgttaatcaaggccgtgtattgcttgatttggattatgctgaagattcaacttgtgataccgatttaaatgtggtcatgacgcaggcaggtgggtttattgagattcaaggcacagcagaagaaaagccatttactcgtgctgaagctaatgcgatgcttgatttggcagagctgggaattgggcagattatcgaagcccaaaagcaagtattaggctggtgatatgctaatcgttgaagataatggcgtgatcatcacattaaatggacaagtaaaagacccattattttggtggtcgatgatattgctgctgctgggtgtcttggtggcaatcatttgtttgattgcacccgttttttatgcaatcggtgcgttggctttatttgcagttgtggtatttgtgtttaatattcaaaggcaaaaagccaaaacttgtcatatgttttcacaaggtcgcttgaagattacgtccaaacgctttgagattcataacaaatcactaaccttatcagcatcggcaacaatatctgctaaagataacaaaatgacaattgttgatcggggcattgaatatcattttacaggttttgctgatgaccgtgaaattaatatagccaaacaggtacttttgggaaagtcaatcaaaaccaatgcggtggcggtaacattggctaagtagttgttgtgatacagacaggttggatggtctttaactccacccacctaactttttctttgtttggatttaagagtatgttatgatgggcaggattttattttaagtcatcatttaatgcaatcagttgtccagagtagccgttcatgaaagtttcactgtctacattgactttatctattttgtcatgttttgctatcctagccattcagcaagcacaagctgtaccaaatcctgtggcatttgttgacgaagtacgcagtgaaaatgatcttgggcaagacaatgaattacccattgatgtccaaagtgcgacacaatcagcgtctactgatacggctaatcctttagacgaacatgaaccagagctttatacgacagctttagaaaataaaaccatgctgattaactgctcagcacttaatcaagatatcatgcgtttggcgtgctatgacactttggtgcatggtgagacgccagcggtaattaaaaccaagcgttccattcgccttgatgaaacaatttggcagaccatcaaaggcaaaccccaggttatctatcaagaaacgacagatccgatttttttaatgggtaatgaaaaaggcatgctgaccaaaaaagatgccaaacagcttgaatatgcagccaaacagtttacaccactgagcttatcatttgatttagaccgaaataatacaccactttggtcatcacgaccacacaatccgatgtatgtattgcccatatttatgcacggtaagcctaatcgaagcccaaatacgcccagtcatgaagcaaaacaatttaccccaaatgaatttcgtgctcccgagctaaaatttcaggtttctgttaaggttaaagctgctgaggatttatgggggacggattcagatttatggtttggatatacacagcaatcgcactggcagatttttaatggaaaaaactctcgtccttttagagtacatgactaccagccagagattttcttaactcaacctgtatactcagacttaccatgggatggcaaagtccgcatgattggcatgggtgcggtacatcattccaatggtgaaagtgccaaactgtctcgctcatggaatcgtgcttatttgatggcaggcatggaatggaaaaacctgactgtcatgccacgcatttgggggcgtatctttaaagagggtagtggcagccagccagatgataatcctgatatcttggactattatggttatggtgatgtgcgttttttatatcaactagaaaataaaagtaatatttcaggtacggtacgctataatccacgctcaggcaaaggtgcgttgcaacttgactatgtctatccgcttggtaagggaattagtggctattttcaaatatttcaaggctatgggcagtctttgattgattataatcatgaggcgacaagctttggcgtcggacttatgcttaacgactggatgggtctataactcaacggcaaatcaatatggaacacggcttgataaacttgctaaaaaaccataagcataagcgggcttttaatcagggcgttttagctaagcctgtatttgatcaaccatactgggtgcatcatcaggccgcaatttggctatttaggttgcatcgtcgctgtgttttatgccaattacaccatctggattatcagatgggtcggatgaattttatttgtgctgattgccaagcaaacattgccacccaagtttcgtattttaacatccacctaaacattggcaaagattttcctaccaataaagataggttgaccgcccaacaaaccccaaagcgacaacatatccgtgcttatcctgtaagctattatcagtatcctgtcaatcagctcatcaaaaaatttaaagaccatgaaaattcacaatcattgttagcattgtacgcattgattgcccacttaccaaagcctgactattgccatgcaggtaatacggtcattttacccataccaacgacccaagaacgcatgcgtcagcgtggatttgaccctgttgcaatcttggccaaatttttggcgtggcactggcaattaccactttggcagggtgtggctcgccatgatggcaagcgtcatcagcgtgggctaactcgtcatgagcgtttagttaatactcaaacagatttttatttatgtcaacaaattcccaatcgtcaaatcattatatttgatgatgtcatcaccacaggggcaacagtagcagcggtggcaaatttattaatacggcatcgtcaagatattcgactgattgcaatttgtatggcacatggttctgctgatttcggttttgatactcatgacagataataatccatccaccgctttgataacgactaatgaaggtggttttgggctgattgaggtattgatctcacttttattgttatccgtggtggcacttggactaatcacagtacagggacgactgcttgtgcaaactaagcatgctgatcttcgtttacaagcagttcagctgatggcaaatgactaccatgcagttcggtcatttacgccagagcaaaagcagatttatatccaaacacttcaaaggatcgcacaaacagcacaaagccgctcagaatcagacatgaatagttatcgtatcgcagcttatgctaccactatccgttgtcgcccagagtgccatttgaatgaacaagcccaatctttggcgatacaatcagcacaagctgctgcacgggcaaatatcatactgtcggtcaccgattgtcagttgggtcattgctgggtcgctggatggggtatgcaagcttttgaattaatcaaaacttgttctaacgatgagcttgggttaaatattagctcattagactgtgccatcatggatggtctatgaaaccaatattgacaaatcagcaaggcatgactttgatggagctggtggttgccttaggtttgggttcattcattgttttgatggcagtgaatttttatgctttatcagccaaaaatagtgcctatacgcacagtattgcacaatttatagatcgtgagactttgggcatcacggccatgaccgagcagcttagactggcaggcattggcatcatagatatgccagctgtgcttgttcataaagaacagttacttggcatcagtagcagccaaagtattaatcttaatcatcagctatcccaaacaggtggcttaccaagccactatcctaaatcctccgatcagcttaccatacattatattgcgcctgcggatatgtgggattgtgaagggagtgttgttcttggaccccgtccagctcgcctaaaaaatggtaagatggctatggtagatggtcaagttgttatcgaaagatattttgtacaaacagaaacagacggttctttatccttacgctgtgatgcagggcgatacatcaccgatgaaatcatgcgtgatggcactcgaaatcgacacggtatcagcgcaccttatataactgcagtgattgatgctcaggtcaataagcgatttggcaccgataaaccaaaccatattcgtgggcttggtaaaggagatgtgatactgtcagatattgaaggtttttgggtgagactgatcgtggctgatggatcaaccagacatagcatgacgattgaaaattatcaaacacattggtatggttatcccattattggtgtacagcttgctatactcagccgcagttcacctgcaccacatgcaagccagacacacaactttttaatttttgatgaaagcatctcgccgccgaatgatggtttgccaagaagattacatacgatgaatgtcaattttgtcaatgcttctttgaatcagaccaagatgagccaaaatcatccatgaataaatctgccaatcaatttaatcatttaaaagtattatcgataaaaacttacgataaattgcaatcaggctttgtattattggtcgttttggttgtgctacttttcatcagtgagctgacggcactcatgatgagccaaaattctgtggatgtacgcagtgtactttatcaccaaaatcaatacaagctttttatctcagctgataaggcggtgatgaatctatggcagttgtctcccaaacatcttgttcatatggctcagactgatacatggcttgcctcactattatccgataaggatgatttgacaaaaatttatacagctcaaagctgtgatgactggcaaacatttagtatcagtacgcttgatgatccgccaacacaatgccatcacactgtacccattgtaagttggcaagctgcttatatagagccgattggtgccaatcattatctaaatacactgctccaaaatacactgtcaaaacaatcagcccatgatattcaaaaccccgatcaacaagcagtgaatgatgacacagctcactatgaaatttttcacttaagattatatgccatcgccgctcaaaactcacaagatatcattcagtgtcaagaaccgctatatcaaacacgcatcaccacttgcctaaatgaccacggagttattcataaaatcagcgttgctgaatggttaatttggcgtcaaagaattcaaaagaccgattcatctgccgaagcggccaatgctattcgtatcatgcctttgcgaacctatgatatacgctcaatgcgtgaatagatttagaagaactgatggttcacaaaaaattaccgtagccactgtaatttttatttggctgtggtaaaatagtcaagattttttgtggatttgttgatgttgctataattgtaaaatattgtaacaatactaacgcatttctatcatataatagatagctaatacaattttgacctatttatttacataaacgcatagaaataccataaaaataggggtggcattaagcgattaatcgtattaaaatgtaaccattaataacttagatatgcctttaggttgttcggtgtatcgattttaggagaaagtgatgaaagctgttaaattatctgtagtttctgctgcagttctactgtcaacttctgcaatggcaaatgttgttaccaatactggtgcgaccgttgttgacggtactcgtaccatctttagtacactggttagacctgcggctgtgagtgctgaggttggtactttgggttatggtgctaatattggctgggcggtgaatgacactgttgagctacaagcaggttgggctggtggcaatatcgcaaaatccatcaatgataactttaatgccaatggcgttaactatcagcttgaaactgatttttctaacccatacttaggtgctcaagtgcgtcctgctgccaactggttcaccgttgggacaggtatcatcgtacctaagaacgacatcaaagtccgctcaaataacacaaccgatggtgttttccgtgttgatggtaaagactacaaacaaagtgatgtaggtcagcttactggtaagcttgagcatcgtaacaaattagcaccttatttgacactgggtttccgcccaaatctacacagtaactggggtgtatttggtgaagttggtgctgcctatttgggtaaagtagatgctactgttgatgcacaaaatccaaccaaatcagtaactgctactgatagcaagacccaagcgactgtcattaaaattgcaaaacaagcagagcgtgacatcgaagataaaaaatatgccaactggttcccaatcgctaaagttggtgttacttaccgtttctaatttaagcttaggcttgaatcaaaaaggcagtgcttatgcattgcctttttattcgctgaaattaaaatagagcagttagcttgagcttagggtggttataaaagtaatcgtcattattttttattaaattgattgaattgggccgaatgtcagtcagataacatgacatatccgcacccatgccagtatacagctgatcttgaatcagtttgattcggcactcttttaatcgccataagatattaataagctgttgcctatcagtagagctaaattgagtaagtagataaatttcattgggatgaaagtatcgttcaaccacactgtatttaatatcgttaacttctatgtcaatggcacaaggtgttaagctgatgatgagagcgacttgattatctgaatggctaaagctgacaaagtagcgtattttatttgagttaatataataagggtgtgcatggtcatgaaattcaccaacaatgtcaaagcggtgcatggtgatttgtaaaagtgaacgcacacacgcagattgagcctttttttgtttaagtcgctgacggcttgtttgtaccatttttgcaaatgcgatgatgacttgtggtgcaggttgtaaaaaaatggcagagtgaatcttaagcatgatgatcaaaaaataaaaagctcaaaacaggctgaccctgatttgagcttgcttgactggttatcattaataagacagttcagcacgacgattttgtgaccatgcttcttcatttgtgccaaatgcgatagggcgttcttcaccaaaactgataatctcaacgctggcttgattaatgcctttaccaagcaaatagttgcgtaccgccaccgcacggcgttcccccagtgacatattatactcacgactaccacgctcatcggtatgacctgcaaccaaaacacgagctgtttgattggtggttaaaaattgtgcttgttcgtctaagatggcagcagcttgcggtttaatctcatcagaatcaaagtcaaaataaaccaaactgggtagcttgcttgccagagccttaacggtctcatcattatctaccaaaggtgcaacaccagtatagataaccccagtgtaacctgtgggtgcattaggagcaaccataacttgacttgttgatttattggcacagcctgtcataaaagttagtaccgataaagcggcggcagcggcggcaatttgaatatgtaacatcataaggataccagattttggcttgtcaatcgttgtgttaatcattgtaacggtttatagtgattgtcaattaataagggtaaaaaagtatttatcaagtaataatctttcttatatgtgaatataatgacaaatttatcacatttttacaaggattttttatcaagattaggatatgttccagcttaattattagtgatgagcgtgtgattatttggcatcgttaaatttatgagtgctaaaattgccaaatgattaaaattttgctaacatgatagcccctttggtaggctttatttggtattgatgagcaataataatataccgagttaaatggattaacttaacatacgccaaaaacttaacaacgaaaagtagatgattatgacagatacagtacaaaaagatacagcacagtcccccaaaaaagtttatctaaaagactacacgccgccagtatatgcagttaataaagtggatttggatatccgcttgtttgatgatcatgctgtcgttggtgccaaacttaaaatgacacgagcacacgcaggcgagcttcggcttcttgggcgagatttaaagcttaaaagcattcacctaaatggtcaggaattagagtcgcaggcgtatcatcttgataaggaaggcttaacaattttagatgcaccagatgtcgcagtgattgagacattggttgagatttcaccacaaaccaacacaacacttgaagggctatatcaagcaggaacaggtgatgataagatgtttgtgacacaatgcgaacctgagggttttcgcaaaatcacctttttccctgaccgccctgatgttttgacagaatacaccacacgcctagaagcaccaaagcattttaaaaccttgcttgccaatggtaatttggttgagtcaggagatgtggatgaaaatcgccattataccatttggcatgatcctaccaaaaaacccagctatctattcgccgctgtcattgccaatctagaagtgcttcaagaccactatacaaccattgaaggtcgagaagttttgcttgaggtgtatgccgatgctcaagatattgataaatgtcatgttggtatgcaagcgctaaaagatgcgatgaagtgggatgaagataattatggtcgtgcttatgatttagatcgctatatgattgtggcgacaggtcagtttaatatgggtgcgatggaaaataagggcttaaatatctttaacaccagttgtgtattatcaagccccgaaacaacaactgacgaacgcagttttttggttaaatcggtgatcgctcatgagtactttcataactggacgggcaaccgcattacttgccgtgattggttccagttatgcctaaaagaaggatttactgtatttcgtgaccaaagtttttcaggtgattttcgctcaaaagcggttcagcgtatcgaagatgttgctgtattacgggcagcacagtttgctgaagatgcaggttcgttagcacaccctgttcgccctgagagctttgttgaaattaataacttttatacaatgaccatctatgaaaaaggtgcagagattgtccgtatgattgccaatttcttgggtaaagagaaatttcgccaaggttcggatgaatattttgctcgctatgatggtcaagcggtaaccgttgaagatttcttatctgcgatgtcagtggcagatgctcgagtgatggattttttagcgtggtatcgtcagccaggcacaccagttgtatcaggtggctatcgtgttcttggcgataaagttattattaatttatcccaaaaaacccgccatgtacctaattatgatgcacccgttgcactaccaatccccgtagatacggcaatttttgatagcctaacaggtgagatgttggcaagcagaatgttgcttttgacaacagataatgcacaatttgaatttgatcacattcagctgtctgatggtgctcatcctgtggtatcagtgttgcgtaatttttcagcacctgtcaagattgactttgattatacagatgaagatttggcaagtttggtggcgtttgaaagtgagggattcaaccgttggcaagcactgcaaatactgatgaatcgatggttatccggtagcgtagaggacgccactttaatcatttcagttatccaaaaagctgttgatgaattgattgaagatgatcctatgctggcagcacgattatttgatattccaagccaaaaagagcttgcgatggcttatgatgaaaattatgaccctatcagtgttaaagctcgccgagatgaattgattggcaaaattgctgatggtttgctagaaaatgccaagctttggtatcaaaaattaccattacaagcgtatgaagacacaccgcaggcacgaggtcgccgtttattgcgtaatgttttattggatttgcgtttgacggcaggcgatgagatggctcatcaagatgcttatcatcaatacgataatgcgtcttgcatgagtgagcgactgggtgctttgatggcaatgattgagcataatttggataaaaaagacagctatcttgatgatttttatgccaaatttagccatgaagatttggtgattgatgcttggtttgtcgcacaagcaacgccagatagtaccagtgtctctcaaatagcctcactcatggagcgtaccgattatgattggaacacaccaaatcgtgtacgcacgaccttaagtgctttggctgccaaacctgtgcaactttggacagctgagggtcttgatttgtatttgtcatcggttgtacgcttagatggtagcaatccgcagttggcggcacgcttgctttctgcgttggctcgttggaatactttgacagctgataaaaaagcgatggctcaagaaaaactggctgcagttacctctcaggtttcatcaaaaaatgtgcttgaatttttgcaaaatatgcaaacggtagcataagtatcagtcattttaattcgggcaggtaaccgcttgcccgttttattatttgatgatttttattctcatcaggatagtcttttattaacttaactaaacaaatattaactcaacaaagaatgcaatcttatcttagtcataaaatcacttgatagccatgtctgatacccatgctgttcgaccgccgttatattatcgtttggcaaccgtgatgcttgcacccatttatcggcaaatggttatcaaaaaatccaaaaataagccaacgcttaagcgggagttaaatgagcgttttgctaagcactatcagccgccacctgttggcaggctaggcgttatttggtgtcatgccgtttctttgggtgagctaaatacagtatacccattattgcttaagcttttgaatcacggttatgggctgtgggtaacgagtaccacccaaacaggttttgagcgtgcggctaaattatttgataatgaaatccgattggggcgtgtggcacatagttttgtacctgtagatacgccttcggtgattgatacttttttaacgcatgtcaagcccattgcagcattgttcattgaaacagagctttgggctaatactttatatgcctgccgaaaacatggcatcaaaacattaatgattaacgcacgcttaacccaaaaatcttatctaggatatgccaaaattgccaaagtaagccaaacgatgatggcaaatcttgatggtatcattgctcaagatgccagctctgcaaagcgatttggacagctgggcagggtttatattgtccaaagtgattcgttaaaatgggcaagtgtcagtacgctaagcgatgcccagttggcagccgttaacatcctaacaaggcagcttaatcaagcatgtaaaacatacatttgggtgatggcaagttcgcatgatggtgaggagtgcattgccctaaaggcacatcagcaatttttacaaaaattccccaatgcactactcatccttgtgccaagacatcctgagcgatttgaagtcgtccaccaaatgtgtttacaaggtggttttttgactgctcgccgttcaatgggtgaaaccattagcccaaagacacaaatttatcttgccgatacgatgggggagctactttcttggtatcaagtcgctcagattgcggtagttggcggctcgtttgtgccaattggagggcataatcccattgaacctgccagccttgccacacctgttattatgggtgcttatgatgataattgtaaggatttggttgaagcactaaaacaggttggtgcattggtacaactgccagatgagcctaatatttcagagcaattatttaaaagcttattgcaggcatctttatctcaatggacgggcaaatcaggtgctgtattggtacaacaaaaacagcgtgctttacaagagcagtttttatttgtgctgcgtatgatttagccatatgttatgcaaaaataatcatgttattttttaaaccatctaaatgatatagtgtgtaatcagggtaggcatctcctaagacatcttaagactttaccgaattggatgggtgtgatttgattattaaagctgtgctaaacttgaaccaacatcgacgactatcttaatcacatatcatcactcatgaatattattttattaaacgataacgattttatcaccgccgacagtgccgttattcataatcagtcaaccattgtacatctaaaaacggtattaaatgtacaccatggcgattttataaagttgggaaagctggggggcaatatgggtcatggcaggattgtccatatggatgaaaatcaggtgatattatcagagattactttgaccaagtcgccaccttgtaaacttaatcttgtggttgttttggcactaccacgcccaaaagttttaagaaggctggtgatggatatgacagcagcaggtgttcgccatatggtctttattaacagttatcgtacggataagtcctattggagttcaccattactgtcacgattggatgaatttgtcatcgagggtctgcaacaaggcatagatacaatagctccacagataacacttgccaaacggtttaagccatttgtgcaagatgacttgccaagtcttatcggtgatggcggtgcaattgtggcacacccttatgccgaagaacactttggtaaactcacccaaaaccagttaccacaagttttggttgtgggggcagaaggtggatttattccttatgaaattcagcttttggacagtgtaggcgttcaagctgccagtttgggcaagcgaattttacgcactgaagctgcggtcaatgcgttactgggtagatggctataatcaatcactaaagtatcattaacggtgctatttttgataaaaagtgcgtgttgttgataaagatggtgcaattgatatgggtgatggggatatcatctgtggcggtggtgttaagtgtgaagatgaatttaatgcagacaatgagataatgtcatcagccatttgcctgcccaattgttgataacctaaatgggtaaaatgtaccccatctttggtagctttgccacttttcatccactgcttcattgagcagctgccacccatggccgattgccaatcccaaaaaagcgtgtgtttattttgggcagtttgacgctgcacttcttgaatggcatgtaaagttggtgggcgtacaccgcagctgcctgctgtattttttagcacctcaggcgacgagacaatcataatcgctgaatgtggcgatgcttgacgaatttgttcaatacgctcatctaatacggtagcgatgcgttcggcactaagattgttataagcttcatttgtgccataggcaagtatgattagctcaggtgcaatggttgccaactcttgttgccatgcgttttgattccagcggctccaatgtgatagctctgcaccattgataccaagtgatgagacaatggcaccaagttcatgttttgacctaccccaccagccaccaatggcggtatttgtcatactgccttcagcagtgagcgtaaaaggcaatttggcatcaaaagttgtggtttgccaagtatcgtttttaatcggtgcttcaagtatcagatgattgccatctgcatcactgattttaaataagccatcagtggcactttggcgaatgctgacggtcattgattgcataggctcttgattttttgctttaatagtcagcgtactgcctgaaaaatttggcttagcgattaaaccgcctaatgtataatcctcattttgattgcggcgacttgagatgggtgtccattgataattatcatagccatagcgtgccatacgctgaccgctaaaatacatcggcatcgcccagcccataccaccgttaccatagcgactttgtaactgactacgtagtgcttcggtcatgctgtcgcctgcagtatgtgagtcgcccagctgtacgatatgaatgcggttattattgagagcttgaatgagctgatcggtatttggatcttgataattggttaaataatttgccgatgtgctcattgacatggctaacacagataacgcaaaaaattgtttcataaatttgcctaatagatattatggtatgatggtgatttgatcttgtacagcttgggcgattaacttttgtcctttgacactaaaatgaataccatcagcggtacgcattttaacgctttttccatcttgtatcagataatcattataaatatcatcgcttgtgcctaatagcttgcgtgaatcaatgataagtacatgatggcgttttagttcatcttgcataatctgatttagataaatcatctgcttattgagcttttgttttttcatatttggcggtgtgatccaaatgacttgcgtattgtgatttttggcactgtccaaaatatccatcatacgctgacggtagcccatctcccattctggcgtttggaattttaattgaccgccattgaccaaatcaggcatatcccaagggtcattaggccccaaaaatacaaccaaaattttgatattggcattgatggacagtgtctctttgatggtttttggccaattaaataggcttggataagccaaacctgtactttgtttggcaagattgacggatttgatgttgtaatttttttgaagatattgctggatatgcggtgcgacgccttgcatcattgagtcgccagcaaaaaaaatctcatcacctgaatgtagtacataaggattgtcaggtttggcctctgatacgccaacattatccatctgtacagcgggcgtagattcaaggctttttgccatcattgcctgatatttgggggtataagccaaattgtcattaaaataatcaacaatttgctgatttttctggttaatagcactggttaaatcaccatgccaagcatacagtttattgccgatatcaccacccattttccaagcaggataacgatcaagtaagcttaaagggctgcttttgtgataagtttgtagataatatgcattaatggaattttgcattatccatgcaccaagtgtggcaaataagcacagcactatcagcaaatagctgtaacttttgccgtgaaaataaggcttggggcgcagctttagccgaatatgcttaggctcagggtattgcttggtttgggcgacctttgagattggttgattagaagtttgcataaataaatcctggaatgcctgacggcgcaaaaataacaacaatcatcaaacaaacaaataaaagactgattaggatgggcttgggcaatagactaccaaggcgaataatattaagagtttggcgtgtgtagatggggtagatgaaccaagctatcataaaaagtgccagtataaacagcggattaccactccaagcaatgttggtatggttgtatgccaatgcctcaaaaatttgtattgcctcactccagctggttgcacgaaaaaacacaaaacaaaatgccacaaaatgaatggtcacaaaaatcccaatcactttacctagccaactgtggcgatatagtgcattgcgtgcatgtttggcatcgacagcataaatattttggtagagtttatcggtacaatttaaccaaatgatggcaagcccatgcaacacgccccaaagtagaaaattcacactagagccatgccaaatgcctgataatgccatggcaattaataaattgacttgggtttttataaagccctggcgactgccccctaagggaatatagatataatcacgaatccatgtagataaactaatgtgccacctatcccaaaagacacgaatattatgtgcgattaatggtgctttaaagttgacaggcaagcgaaaaccaatcaataaaccaaatgctaccatcatctcactgtaccccgaaaagtccaaaaatagctgtagcgtatagccataaattgcgactaatacctctaagctatgatattgcatgggattggcaaagatgggattgacccaatggtcagccaaccagcctgccagccaccattttttaatgagtgctaataaaatcaggcaaagtgcgatggtgggaaataaaatacggcgtggattttggctgatgatttgttcgctcataccacaaggattgccctcaatatcagtcagtcctgataccgacttggtgcgtgcgataggacctgcactgattgtcccaaaaaaggataagtggtgcaacagtgccataaaacttaactgaggtacatcatattcatcataataacgactgaccatataactgatggcttggaatgaataataagaaataccgagcggaaaaatgatatttgccatcacccctgatgaatccagctgcatggcatcaaggctgtacttaatcccttctcggaaaaaatcataatatttaaaaatgctcaactgaatcagtgtgatggcaatccctaaaatcagccaaaatttcttgattttagagccattcatcatctttgtgatgaaaaatacaaatattgtatagccaaataaaatctctgtcgcaagcgtacctgccattagataaatgaccgtatagctaaataggataatgagaaaattttggaattttggtgtttggcgaaacagccaataaattgccaaaaaaccaatgaacattaaagtaaattctaaagacagaaaagaaaacatggctcaattctataaaaaccaagaaaatcacttattttaacacattatgattttatgattcatacatttaaatatgcttgctaagtctgatatcaagcaggatttttgaaggcgatgatatgcagatatcgccccatggcacgaaaaggcagctggcgtgagtattcaagttccatcgcaaccacatcgtcggggttatttaggccaccacgcttcaggggtgcataatctgaaaatacccgaatacctgagcgaatactgattttataataatgagcaattagccatgcttcgacggtatcgggggcgacagggtgattgggcgttaaacttttatcatcagcagggcgaggcgtattaagctgataaaaatttcccatgattaaattacgataaattttactggcaggattataaaaacacaaagacagcatgccaccatctgccaaatactgatcaaaaaaagtcatgattttttcaggctcgcccaaccactcaagtagtgcatgacataagataatatcaaactgctcacctgccaaatgatttgacaatgcctgataagggcaagtgataaaccgtacttgatcatataccccaagcgatttggcatgatcttttgccatatctagcatattggttgaaatgtcattgaccgttacatgatgatctgatgccaaagataggctaatctgagccagtcctgcgcccacatctaagatgcgtaaagggcgattgagcataagctgatccatcgcttcgcttaaatcttgctgaagcacggctaagcgaatgcgtcctttaagaccgccatatacttttttggcaaagtgttcgctaatggcatcaaaatttctatcgttggtgatggtcatagttaattgataaataaaataaagcaaccaaatgtaaaggttggtgtgcgtgatttgttgatgaattgtgttataataagggcattttcgccaatcaagtattatagcacagcgtgcttttcttcgataaattttataaattggcttttgagtgatgagcatctttatgaaaaaatctaccatccaatatttaagcttaccaactgctgcactattaacgctggctggttgtagtcatgacaaccaccgtgatgatgagatggcggtggctgagcctgtcgttcagcagattgatgacatttgccaagcaccagccatgcaagcaaatctacaaaatggtatcaagcagtccattcttgatgccgtgatgagccaaatgacggatgcagaccccaaccaacgcctcgccatacaaaataccattggtcagcagctgaatactttacaaatcaccacccaaaatgccacgaattttgccgatagctgtatggcggatgtacatataacggtaaacccccaagatttggcgaatgcagaatttgcttttgctcgttcaggggtaactttattacagcgtgctagccaagatcaagttgagttttataatggcacaattgtcgccaaacaaataacttatcaaatggtcaatggtaatgtggtgatgtatggcaacaatcataatgccattcttctgattgccgatattttggcagcttctacaagcagtttgccacaagtatccatacaatctgatgttaccgcacgaccacaagcaattgagcgactgccagaggcaccaatagctatgccatcaaatcctcaagaagattctagtgtaacgacgtacattgaacaaaagccagcacctaacgcacaggtgtcatctcgcccacgcagcgagatgtcttcaaataattcagcacagacacccacacaaaactcggtagggcaatcttctgcagctggtagcacccctcgtgtggatcgtgatagtcaagccaaagccaataccgagcgtaccaccgagcgttctgcaaataagacatctcaagacttaccacacccacagccaccaacggcgaatgccagtagtgatggcaaaacaagtatcagtatcgttgagtcaaacgaaacctattgattgccgtttgaccctgaaatcaaaaaacccttttgaccatcaaaaagggttttttgatggctataacggcttggatgagctgttgaaatggatacgcaatctataaaatttatgttacaatcaatgagatttttaagtttttattttatcacaatcaacatataatggagagatttatgaccttggctcgaaataagtttgctcaagtcatgccaaagtttgccgctatagccatcgcagctttggcggttggctgtagtcaacctacccaaacaatctcacaagcacctgccgatacctcaaatacccccaccgaaaaaactaccaaaaccattgcgattaccgccatcgttgagcatccgtcattggatgatattcgcttgggcgtggtggatggtttggcaagcttaggttataaagacggtgaaaatttgaccgttaatttccaatctgcccaaggtaatatggcgactgtcgggcagattgccaagcagtttgtggcggatacacctgatgccatcgtagctattaccacaccgagcgcccaaagcttggcggcagcgactacaagcattccgctgatttatacggctgtctctgaccctgtggctgccaaattattaaataacaatcatcaagctacccagcctaacattacaggtttatccagtcagctgcccattgagccacaagttgaattatttcaaaaaatcaagcctgaagccaaacgcattggctttgtttttagccctggtgaagccaattctgttgccgtcaaaaataagttaattgaaattttaccaaaatatggcatgactttggtggaagtgcccgccaatcgatcaagcgatgtgggcgatgcgacgcgttcattggctggcaaggtggatttactttatacatcactagataatggtgtggcatcagcgatggaagcgatggttttggctgctaatgagttacaaatacctgtgattacctcagatgaattttcggtacgccgtggtgcgacagctgctttgggtgtgaacgattatgattttggcttgacaaccgcaaaattggtcgctcaagtgttagatggtaaatccccaaatgaaattaaacctgaagtgatgaatactttgaccttatttatcagcccaaaacacgcagccaatcaaggcgtaacggtggatttgacaacactgggtgagagtatcaatgttgacaccacgccagcgcgtcagccgaataaatagcatgttcttagccaaaatatgcggcattgggtgtgagtctatgggtcggtgtattttataaagtatgattgataaattcttaaatgagaaagttttaaacagtaaagtagctgacatggattatctataatttgttaatcccatgtaaataaatcttaccaaatatcttggcaggataatctgcagtgtgataaactgcataaacgcttaattgaaatgatttaaattaagcgacttggcatgacaggagttgctatgaataactttttaaaaacgaccctttgggcaagtttggtggcactaaccttggcggcatgtggtggtgataagcctaccgctcaagctgatttggctaccagccaagccaaaacagtggcaatcaccgccattgttgagcaccctgctttagatgccgctcgccaaggtgcgttagatcaattgactaaggaaggttttaaggaaggtgaaaatctgaccgtaaatttccaatctgcccaaggcaatatggcaacggcaggtcaaattgccagacagttcacctcggataatcccgaccttatttatgccattgccacaccgtcagcacaggctattgcagcggcaacccaggatattcctgtggtattttcggctgtcactgatccgatcgaagctcggttggttgcaaacctagaaaactcaggtaataacatcacgggcgcgtcagatgcgctgccttatgaaccccaaattgccttaatccaagagcttgtgccaactgttaaaaatgttggttatgtttttagcccaggcgaggtaaactcaactgtggtacttaaaacgctcaaagaaaaattagcaccgcttggtatcaatgtcatcgaagcacctgcccaaaaatctagcgatattactcaagctgccaactcattggttgggcgtgttgatgtgatttatacttcaacagataataatgtcattaatgcttatgaagcgttatatcaagttgcaaaaaccgccaaaattccattaatttcagcagataccagtactgttgagcgtggtgctgtggctgcactgggcgtcaattataccgatcttggcaaagaagctggtaaaatcattgcacgcatcttaaagggtgaaaaacctgctgatattcctgttcatatctctgaaaatctagacttgtatatcagcaaaaaacatgcggctgagcaaggtatcattttaccacaagcggtcattgatcgagctaccaaagtggttgaataaggcttttgataatgaccagtttggcaaaaagatgccaatgatgcttgatgtcataagccaaagtagccattttttagacccaagccgattgatagactgccacgcttgggtttgtctttttggtgaatttaatccgataataacttggactttgttataataggcattttaactttttgggcggatatggctgatgaatttgattgctttttttggagcactggagagtggtctgatttatgctttgatggcactgggtgtgctgatttcctttcgcattttagatttccctgatctaaccgccgatggcagctttccgttgggcggtgcggttgcagggatttgcattgtcgcaggcattaatccttggctggcttgtgtttttggtatgatggcaggtatggtagcaggtatgatgacagcttggctgcatgttaagttgggtattttacacctacttgctggtattttgatgatgaccgccttgtattcgattaatctgcgaattatgaatgccccaaacctgccgctacttggacagccgacagtatttacaccattgattgatggtggtaatggattttgggtgcgtgtggcagtcattgcaggggttgtattggtggtaaagctggctttggattggttttttatcaccgaaatgggtctgtcaatgcgtgcgacaggttcaaatctgcgtatggcacaagctcagggcattaatacgccatggattatcattcttggcatggcgatttcaaacggtttgattgcactatcgggtgctttgtttgtgcagacccaaggatttgctgatgtttctatgggtattggtacgattgtgattggattggctgcggtcattattggcgaggcggttttatctgccaagcgaattttttggatgactttggcggtggtgattggtgcgattttataccgtttatttatccaaattgcactttctagtgagctattgcgtggcatcggctttaaatctcaagatttaaatttagtgacagcatttttggtgatcattgtcttgatgttgccaaaaattaaagccaagctatcaccaaaaaaacactaaggagtgtaccatgttacaagctaccgatcttcgcctaacctttaatcttggtacgcccatcgaaaatcctgcactgcgcggactgtcgttatcaattgctgatggcgagtttgtgacagtgattggtaccaatggtgctggtaaatccactttcttaaacgccatcagtggggcggtgcgtgtcgatagcggcagcatcaaaattaatggtcaagatgtcactcgcttaaagacgcatcagcgtgccaaacaagtggcgcgtgtttttcaagaccccatggcaggtacttgtgaggcactcaccattgaggagaatatggcactggcttacaagcgtggcggtatgcgtggcttagcaagtgcattaaataacaaaaatcgtgagttatttcgtgaaaagctatccatcttaaaacttgggttggaaaatcgcctaactgatcgtatgggacttttgtcaggcggtcagcgtcaggcggtcagtctattgatggcaagcctacagccctcaaaaattttgctgctagatgagcatacggcggcactcgatccaaaaaccgctgcttttgttttggatttgactgataaaattgtcagtgaagggcgtctgactacgatgatggtgacgcattccatgcaacaagcactcacgcatggcactcgtactgtcatgctccaccaaggtcaagtgatgctggatgtatcaggggataaaaggcagggcatgaatgttcaagacttattaaatatgtttgaaaaaactcgtggtgaaaaggtggaagatgatcgcttgattttgggctgagagttgtatggatttagtttgtataagcttggtttatcgtctgataagtaaacctttaaagcaaaacgaattgatatcaccacacatgacatcaatgatcatgattatgataacagggtaagccattaaccctgtttttttattgttaagaaaatatatttttattcatccgatgaatatcatagggcgatacttttgtgatttagactatctgattaaaaaattattatatgagtaaaatcaataatttataaaaatagttgtggataactttagcccactattgaaaaatctagcactatctaccatataatagccaataatgcaatgtatatttattgatattttgtcattaataaatcttaatgaatatatagtgccaatgattatatttaaggataattatatgaattttgagaaatatactcgaacactgcaagaggttattcgtggggcacagcaaagcagtcttgggcatcatcatactgcaattgcccctgtgcatttgctgagtgctgtggctgataatcatactgcactgtccatcattgaggcgagcggtgcaaatttagcacggctacaagatgagattaagacactgctttcttatcaagcggtgatcaatcagcccacaggacaagtgaatttatcacctgaaactatcaaggtcttacaggcaacagaaaattatgcggccaaagcaggcgatgagtttgtaccgattgaatggctgattttggcactatttgagaataaatcactcaataaagcctttgtatcatcaggtgtgaccgcccaaaatttacaaacaattatgaaaaatattcgaggagatgaggctgtgaccaatcaaaatagtgaacaaaatcgacaagcattagataaatataccatcaatcttactgagcgtgcgatggcaggtaagcttgaccctgtgattgggcgtgatgatgaaattcgccgtactgtacaggtgttatctcgccgtaccaaaaataacccagtgcttatcggtgaagcaggtgttggtaaaactgccatcgttgaagggcttgctcagcgtatcgttaatggtgaagtgcctgaaagcctaagaaataaaagcgtgctatcgctggatatgggttctttgattgctggtgcgaaatatcatggtgagtttgaggagcgactaaaagcggtgctaaatgagcttgccaaacaagacggcaatatcattttatttattgatgagctacataccatggtgggtgctggtaagaccagtggtgcaatggatgctggcaatatgcttaagcctgcacttgctcgtggtgagttacgctgtgtgggtgcaacaactttggatgagtatcgtcaatatattgaaaaagatccagcacttgagcgtcgtttccaaaaagtcttggtagatgagccgactgttgaagataccatcgccattttgcgtggtctaaaagagcgttatgagctacaccatggtgtcaaaattatggattcggccatcattgctgccgctaagatgagccaccgctatatcaccgatcgtcagctgccagataaggcaattgatttgattgatgaagctgccagccgtatcaaaatggagcttgatagtaagcctgaaagtttggataagctagatcgtcgtatcattcagctaaaaatgcagctagaagctgtaaaaaatgaagaagatgctggtgcaaaatcacaagtcaaatcacttgagcagcaaattgatgacgcacaaaaacagtatagtgagcttgaagaggtttggaaagctgaaaaagtaggtgttgaaaaaagtaaacagcttcaagccaagctagataccgcacgcatcaccttagaaaaagcattgcgtgaaggggattatgctcgtgcttcacagctacaatatggtgaaatcattgcacttgaaaagcaattggcagaagagcagacagatgagccagaacatgcacccaagctacttcgtaataaagtgactgataacgaaatcgctgaggttgtgtcgcatgccacaggcattcctgttgccaaaatgcttcaaggtgagcgtaataaactgttggcgatggaagatgtattacatgagcgtgtcatcggtcaaaatgaggcagtggcggcggtcgcaaatgcggtacgacgcagccgttcgggcttgtcagatcctaataagccaagcggttctttcttatttttgggaccgacgggcgtgggtaaaactgagctgactaaggcattggcaaatttcttatttgactctgaagatgcgatggttcgtatcgatatgagtgagtacatggaaaagcacagtgtttcacgcttggtgggtgcacctccaggttatgtcggttatgaagaaggaggtgtgctgaccgaagcggtacgccgtaagccgtacagcgttgtactctttgatgaagttgaaaaagcacatccagatgtctttaatatcttactgcaggtgcttgatgatggtcgattgactgacagtcaaggtcgtgtggtgaactttaaaaatactgtcatcattatgaccagtaacttgggcagtcatgcgatccatgagatgacagactcgccttatgaagacatcaagactgcggtaatgacctcggtcactggacattttagaccagaatttatcaaccgtatcgatgagattgttgtctttcatggtttgggtgcagatcaaatgacgggcattgctgaaattcagcttgatcgtctgcgtacacgccttaaagagcgtgagcttggccttagtgtgagtgatgaggcgatgaatcatttggtatcggtgggttatgatcctgtctttggtgctcgcccattgaagcgtgcgattcagcaagagattgaaaatccattagcacaacttttattatctggtgagttcaccacgggagataccatctttgttgagtggttgaatgatcaattcacctttaataagctgcgttatagctgatttgttgatctagcctatcatcaaaaaccatcggcaaactgtcgatggttttttatttgtattgtaaatgaccagaccaagaaaatatttgacccatatgcttaccctgttgctgtttttcttgccaagtcagatgatgattttgaagacacagtaaatttgaaacccgtgtaccataatttgagctttgaataaaaatactggataataaccgctccaaatatagatcaacacctgtattgggcaattgattatccttggctttttgtgtatcttcaagcacttgccacaccgcttggcttaactttggcgtgatgatcaaaccatcaaaatcaaggttttgcctgactaaaggtagaatttcttgataaaaatgcattcttaaatgtgtgcatttaaaccattcatcactgataagaccatttgataaggtatacacgccatgccagtaaggttggtgctgcctttgttgctcatgtaggcagcttgagtgcgatcaccgacaatgagattaaatcctgcataatctgtttgtgatggttttaagtatgtcaaaaattgtaatggtgtcatttgtgagtcaagataattttgcaccaatgtgccatgcgaggtggcgtacaattttttatcctgtccatcacgaaaattggtcaaaactgcccagcgacctgatagattcacacccatccaagtgccacccgcctgcttgtctcgccctgcaataataccatcacaggcgtgcagcggtaaggttggacgcgcataaaattcatctcgatttgagattaataacagtggtgtcttaggtaacacctgtcaagccaaagcaacaatgcacattggctagtccaatactctgagcgttgagccttttaaagttggtcgatcttcatcggttttgggcgattgatgattggcatattcgccaggatcaaaaaatgcaccatgcttggggtcttctttggcatatattgccatcaaggctgccatgggtatccaaatatcagaagagacaccgccaaatctggcagtaaaactaatggcatcattatgaatttgtagattgtgcgtggcttgataagaagcagctagcaccaagcgaccatcttgggcatactcaagcggtgcaacaacatcgtcatgtgtcgcatcaatcatcagatagggggtaaaatcgttatcctctatccattcatgaaaagcacgtacgatataagggcgttttggggtcataatcattccttaaaagaaatactattaataaagcttggtctggcaaattgctgttcttgatagtgtattaatgggcgtatgagatgtgtcggaagatgaacgcccattttatttagtcgccaaagtagtggcagtaataacacatcacaccatccaaaagtatccgacataaaatacggtttatgcccaaacagcggtgcgattgttaccagtgaatcgcttaatgactttctggcggctgtcgcagcctgaatatcaaagctgtcagaatgggtcagtagagtatagccgtgctttagccagtctttttgtagtcgccacgccagttgacgcactttggctcgctcacttggtgcatcaggcatcagccgtgggactcggtggcgttcttcaagatactcaaagatgacattatgttcatatagtgaaatgtctcgattgaccaatatgggcagggtgtgataaggatttagctcaatcagctcttcagggcgctcctcaccaatgaacacagtttcataatttaagtgtttttcttcaagcaatagccgtacgatatggctattaattccatgatcagcataaagaataaattgtgttaaagaaagatgaggtaaatttgccatgtgtagcgatgatataaatgagcctcttagtgtatcaaaatttttgctttaagtgtgaaattatgtgcttagacctaacatcattatttgtataaaaataaaaaagaccgaatattttcggtcttttttggcagattttatttgacatctttccagaattctttattgagcagataaactggaattaataaaattaataagaataaaataacaaaagcaccataaatcttacggtcatggcgaacaggttcagccatccatgccatgaagttgaccaaatcgccaacacgcgcttcatattcttctttgccaagttcttcttgtagattatgaagaacatgaggcatggctgcatttgcaagtactaggttattagccccccaaggacggcttgggtcttcatagaatgacagtaaataagtatagacccagtcatcaccacgcaggcgagtctctaaagacaaatcaggcggtgcagcaccaaaccattggctttgtagttctgggtcaatccctgcattaatatggtcaccaatggcatcacctgtgacaagcaaatatttttcaaccaattcaggtgggatgtttaaatcttgagccaatcttgaatgacgcacatattgggctgagtggcaacctgcacaataattcataaacatggcagcaccgcgttgcagtgagcctttgttggttaaatcaattggagctttgctacattctaaggtaacaaccgtaccatcagcttcggtatattcaccacaaccatgaccaccagaggctagggcgttggtactggcaaaagcaccaaccgttgccaacaccgcacctgcaccaaatttgatcagtgaattaagtactttcatcagtggcctccggtaacgcgttctggtggttgtttacacttctcaatcgatgtataaaatggcatcaataagaaatataggaagtagagtatggtacaaatacgaccaataattgttgcagttggggttgaagctgtaccacccagatagcctagagtaacaaagctgacaacaaagattgctaatgcaatttttgataacatgcctttataacgaatagagcgtactggtgagcgatctaaccatggtagaacaaacaatacggcaatagcagcacccatagcgataacaccaccaagtttatgaggtactgcacgcaagatggcataaaatggcatatagtaccatacaggtgcaatgtgtggcggtgtttttagtgcatttgcaacctcaaagtttggcttttctaggaagtagccgcccccctcaggtacaaaaaatacaacagcaaagaaacagataaagaagacaacaataccgaccatgtcatgcacagtatagtatggatggaatggaacgccatcaagcggtacaccatttttgtctttgagttttttgatatcaataccatctgggttgtttgatccaacatggtgcaatgccactaagtgcatgaataccaaaccaaccaaaactaaaggaatggcgataacatgcaaggcaaagaagcggtttagagtgataccagagatcagatagtcaccacgaacccattcagccaaagcatcaccgataaacggaatggcagcaggtaaattcaagataacctgagcaccccaataagacatattaccccaagggagtaaataaccaaaaaagccttcagccatcaagcataggtagatgcccataccgatcagccaaaccagctcacgcggttttttatatgagccgtacaataaaccacggaacatatgcaaataaacaacgataaagaatgcagatgcacctgttgaatgcatatagcgaattagccaaccacctttaacatcacgcatgatatattcaagcgatgcaaatgcgccttcagcacttgggttaaacatcatggttaaccaaatacctgttaccaattggttcaccaagacgaccattgacaagacaccaaaaaaataccaaaagttgaaattttttggtgcatagtatttggacatatggtattcataagtttctgtggcaggatagcgtgcatctacccagctcatgaacttcttagcaatactcatgattaagcctccccaacggtcaagattgagccatcgatactataaattggcacaggtaggtttgtaggggcaggtacgccattataaacacgcccggctaaatcatacaaagatccatggcaaggacagaagaaaccaccaaaccaatcagcaccgcctaaatccgctgcaccaacttcagggcggtaggttggtgcacagccaagatgtgtgcacacaccttcgaccaccaaaagctcaggttgtagcgaacgcgtctcatttttacacgcttcaggctgaactgaagcctcagaattgggatcgcttaattttggggttactttgctaagatttgctaccatctcttcggtacgtttgacaacaaagatgggtttgccacgatatttaacggtgatcatttgaccgttctcgatgcctgaaatgtcttgaacgacagcagcacctgcagcttctgctttggcactcggataccaagatcgcacaaacggggtggcaatcgctccaacaccaactgctccaatggcagcggtggttgcaatcaggactctacggcgtttaatattcacgccttcggcatggctcattaaaacttcctccagaaaaagaatgggaatattcccatactgggtgtgtggctataataaaacacttttattaaatttgccacatttgctgtgcctatttttgctaaatatgactattttaagctatttttgtaataaaataaattactcttttacaaacttatcaaaaaagtcaaaaaaaaattgagtgattgaacgaaaatgtatctttatcacatattagctggttaaaagggtttgaaaaaactaatatacttaaaattttcgtaaaagattatctctataatgttaccatattttaaaaattttttctgcattaaagctgataaaatacgcagaaattgcaaatatttaactcaaaattgagaaatttagcacttgcaataactgtcattaaaccaataagactgataggtatttttgacttaccacgataatttgattaatgagctgatgaaaaataagtgtaaaaaaactctcgataaatcgagagcttttttgaaacgataagtgtgaactagcgttttgaaaattgtgggcgtttacgagctttgcgtagacccaattttttacgctcaacttcacgagcatcacgagttacaaagccagctgctttaagtgcaggcttgtggctttcatcagattcaatcaatgcacgagtaataccgtgacggattgcacctgcttgaccattgataccaccgccaacaacagtgatataaagatcgacgctgtcagtaagctcaagtagctctagaggctgacgaacaaccatgcgtgaagtttcacgaccaaaatattcgtccaatgatttgccattaacaacaatgttacctgtgccttttgacaagaagacacgagcggtagaagttttgcggcgaccagtgccgtaattgcgttccataatgtctccttagatgtctaatgctttaggttgctgagctgtatgtggatgttcggtgcctgcatacagttttagctttttaatcatcgcatagcccaaaggaccctttggaagcatgcctttaacagctttaaacaacacatcttcaggcttgtgtgcaagaagtttagtgaagttagtttctttaataccgcctggatagccagtatgacgatagtattttttatcctgagcttttttgccagtaacagcaattttgtcagcattgataacaacgatataatcgcctgtatcaacatgtggagtgtacgatggcttatgcttgccacgaagacgagaagcaatctcagaagctaggcgacccagagttttgccttcagcgtccacgacataccagtcatgtacaacttcagcgggtttggcactgatagtagtagtcatataaaacctatttagttgagtttgagagtaatacaaataaaaatgtcaagcctaagcttgattttacttgtttttagatttggggaaacgaagggctctcaaaaaacagttgcgattatatcaaatcattatggcgttatgcaagcgttattttgagagtttttagccgatgacatggttattttactcttatctttcttatcgttactatcatttggaatgattgctttaccgatggcaacagtaccttttacaacaactttggttgttttataggcaattttggcaggtacagtgacaactttatgaacacaagcactcagtagggtgcaagtcataaatatggctaaaacagaaaaaagtttcataggcttacataattatattaaatatttcggttgtattagtcggttttggtaaaggttatttggttaatttaagcaaattttgacagttaaacaaaatttaaacgacttaaaaatgacttagtgttattgaattttatgaaattatcgcacagattatgttaaaatagcaagtttttataaaattaaaattactgatttggcctattaagcaagtctattggaaacaatccatgaatgcaatctcttatactcatctcaaaacatttgatgtcatcgtcatcggcggtggtcatgcaggcacagaagcatgccttgccgccgctcgcatgggtgctaataccctacttatcacgcataacattgagacgctcggacagatgagctgtaatcctgccattggcggtattggcaaatcgcatttggtgcgtgaggtggatgcacttggtggggctatggcattggcaaccgataaggcaggcattcagtttcgggtgctaaacagccgtaaaggggcagcagtgcgagccacacgcgcccaagctgaccgtattttgtacaaggcagccattcgccacacgcttgaaaatcagccaaacctgacaatttttcagcaatctgtggatgacatcattgttgaaaatactcgtgcggtggcggtggtaacagccacaggcattcgtctaaatactcgtgcggtggtgctgacatcagggacatttttgggcggagtgattcatgtgggcttagaccatcaaagtggtggcagagcaggcgacatgcccgccattcgtcttgctgaccgtttgcgtgaattaaaactgcctgttggacgcctaaaaacaggcacgcctgctcgcattgatgctcgtacggtggatttctccgtgatgaccgtgcagtcaggcgatacacctttgcctgtcatgagttatatgggtgatgttgccatgcacccacgccaaatcaactgttatatcacccacaccaacgaacgcacgcatgagattatccgtgccaatcttgaccgctcccccatgtttagtggtaagattgagggggttgggccacgctattgcccgagtattgaagataagattcatcgttttgctgacaaagacagccatcagatttttattgaacctgaggggctaacaacccatgaattgtatcccaatggcatctcaacaagcctgccttttgatgttcagcttgaattcatccatagcatgaaagggcttgaaaacgcccacattacccgtccaggttatgccattgaatacgactattttgacccacaaaatctaaaaccgactttagagactaaatctattgatgccttgtattttgcagggcaaatcaatggcacaacaggctatgaagaggcagcagcacaggggttattggcaggtcttaatgccgcacgcatggcacttgatgagtcatcatgggtaccacaaagacacgaggcttatctgggtgtgcttgttgatgacttgattacccatggcaccaaagagccataccgtatgttcacaagccgtgccgagcatcgcctgattttgcgtgaggataatgctgatgcacgcttgaccgccatcggacgagagcttgggttggtggacgatgaacgctgggcgagatttagtcaaaaaatggagtctattgccagcgaaaccgcccgcctaaaagacatttgggcgaccccaaacaatgccattggtcaagattttatggcaaacacaggtgagattttgaccaaagagaattcgttactggatttattaaaacgcccaaatatcacctttgacgacattgccaaagtgtcagacagtacagtgagtgctaaggtgggtgaacagattgagataagtgttaaatatcaaggttatattgagcgtcaaaatgatgagattgagcaaatgaaacgccttgaaaatacgctcttaccgcttgattttgactataaaagtgtgtctggtttatccaatgagattgtccaaaaattaagccaaatccgtccgacaacgcttgggcaggcaagtcgcatcagtggcgtcacccctgcggcggtcagtcttttggcgatgacgataaagaaacttaaaaaaacgcaagcagtgatgacatgattgagcgtgatatgaagcaaatatcttttgagtttgggcaaaatcaccccccccaaattcacttaaaagccattgatttatttgcagggatttttttaacaacttaagatttctgttagcgatgccaagcctatcagcaagttggtaatagcttgctgtagctgttttatgctttggtaaaagagatttataagcagtttgatgagtggtatgatgaatttatctaagcagattttagcattgaaaaatcattttggaacccaatcaaatcaacagttcatcaaaacagttcaaatgacctcttgggtagattaaggaatgtgatgttacaagccattggctttgccttttcaattgtcttgccaaatctttttttgatggctttgggttatgatatgaaaaggcgttcagcactcaatgctgaatttatcgaggtagcgtcaagcattgtgtttaattattgtctgccttgtttattattttttagtgtcctaaaaagtgatgtgcagattttggcacaatctaagcttttgctggcaggatttatcacaacttttacattgttttttttggcagagatttacgctaagttttttatcagcgagcttaaagataagggcgtgtttgtgcaaggggtgtttcgctcaaacatggcaattgttagtcttgcgaccgtttttaatgcatacggtagcgaaggcttgggtgtgggtgcaatttatatgggggttatcaccattttatataatgttttggcggtcatcaccttatcacgtaccacccaaaaagcggacagcgtatttatgcaagccaaaagtatcttggttaaaatcatcaaaaacccactgatcatcgctttggtgtctgccttcgtttataaagcacttgatttgcccatgttgccagaatttattaataaaacaggcggattattaggggcagtcgcattgctaggggcagtcgcattgccacttgcactgatttgtgctggtgctactttgaatatcaaatccatgataagcttatcaggattgtccatgcaggcaagcattgggcgtattgtcattgcaccactcttagcggtggtggtgggtgtggcatttgccttagaacctttgcaatttggcgtgttatttttgatggtagcaagcccagcagctgccgcaagttatgtcatggcaaaggcgatgggcggtaatgatatactggcagcaaacattttagggtttacgacagtctttgggatgattggcatggcggtgggcatggcattgttaagggtgcttggctgggcttaacctctattatttttttgtgtatacaaactgtagcacaaacacaacaaatgattagtagtaaattttggctaaattgttattataagaataatccaatgaaagatggttaagccattaaaattcattaaaattttttatacacttagctgataccgtttggtattaagccaaataatgataaggatgctatgatgagccaacaagatattttccaagccctaaccgaatcacatgatagacagcgtaaattgtgtgataagattgaatcgctgatggattctgaccttgatgctgccaaaaaagtctaccctgagcttgagattgagctacaggcacatgctgccgccgaagagcgtcatctgtatgcacctgtcatggaatatgatgatgggctggatttatctcgtcatgccattgctgaacatcatgaaatggatgagatgatgcataaattaaatgatgggcgtatcagtgatgatacttggaaagaaacttgccatgccctaatccatgagctacgacatcatctaaaagaagaagaaaagaagttttttatccaagctaaaaaattattggatgaagaacagcaagaaagattgggtgcactttatgaagtggaacacaatcattttgagcgtaataataatgagtaatcgttacacattaaaatagtagcgatttcataaaagccttgttatggctaacaaggttttttattgttaaaattgatttgatttaagaaaggtttttgacaccagcaccatgtaaggtgctatatccgcctgcatgtttttcaacgataatttgggtatcaatgcgttcttttagactggcgacatggctaataataccaatgcttttaccgctttgctgtagttcaaataaggtattaagtgccaaatctaaagcggtttcatccagtgtaccaaagccttcatccaaaaatagtgattcaatttgtatattttggctattgatctgcgacaaaccgagcgctaaagccagtgagatgataaaactttcaccacctgataaatttttactgctgcgtaccgcatcgccttggtgaagatctgtcactaagatttcaagtgtccttgagctgtctgcatcaaaggtcaacaagtagcgatcgttcatttttgccaaaatttgattggcatgatgtagcaccaaatccagtgttaaaccctgcacaaagtttcggtattttttaccatctgctgagccaatcagcatatcaagttttgcccaaattgcattttcttgttcttggcgttggatgtctttaagaatctgtgtatgccgctgacggttttgaagctcactatttttgatggcgttaagttcgccaatagattggttgacactctctagctgttgttgcagattgatgagctctgtgtgtaaatcttcaagtttgaattgatgaacattggggtttgatttgattaaattatcaagtttttcttgacagttattgattgatattgtcgtttggcttagttgattaatgagagtatcatgagcggtttttagctcgattaactcatcttctaagattaatgccgccaaaaactccgcttgagtatcaaactccgatgccatcagtgcttgctcaaagcttaccttgctttggctgagtttattggccagttcttttatggttagatttaggctctcaatggttgctttttgggcatgtaagtcggcaatatcatcatgtacatttttagtggcattttctaactgctgtcttatctgtgttagcttatcttgataattgttttcagtatgatcaggatttttatcacctaataaagtgatgcgttcattggtttgtgttttaatttcaagcactttattagccatcgtatgctcaagctcagcaataacaggtgtgagttcttggatttttttggtatgtgcgttgatttgagcgtctaggtgaatcagcttggtttgcttattgatataatcttcattgagtgcggtggcttgattggcttgattttcaagcatttgcttggtttgtgataacacatactgaactttgccaaactcttcttccttgagcgttaacgggctagggttgaatgcttcagcttctggtagaacatcgccttgggtgtgatgtgcgatattatcgtaccaagtggtgattttagacacatgctgtttaatggcgttaagctcatttggcaggctgatggtattttgtgcttggatgagctgataaaatgcagataatagttgatcgcaaaaatgtactttaccatcatatatctcacgcatcagcaccaaagcatcatcacgaagctttagaccattgattttcaagttttctttttcgatcatttgtctatctttttgagcaatcagctgattaagttcatgcaatagccgactgctcagctgataagactcttctagatttttaattttatcttgactgtttttaataaattttccaatagtatttcggcttggtagagtatttgcatgttctaggctgcattcactggcgatcgtttgccatagggcattaagatcatgataaagagagttacttgtattttgtgcagtatttagatgctcttgatgatcatccaaagccatctgcagtttgtgtaatgtggtcgtgtgctgagtagcggtgtgattgagttcgttaagctgattttcgcagaatactaatttttctttggcttgtttggcatgttcatcgtccaaatgattgggctgtaatttaaaaggatgctcggtactgccacaaagtggacaaggactaccatcttgcagttggtcaaagtgcattttcatgtataaaatttgcttgtgtagctcataattttccaagatggctttgtgggtttggcttgcttgatggatattttgagaaactgtctctaagatatcctgaattttgattttttcttcttgtaggttgataatcttacggtttgtatcgctgatgtcagattgaatgcgtgcatattgctcataatctttcaagattcgctctagcgtatataaatgatgtgtttgctgcttgattttttcgtactgatcttctatatttttttgtaaaatatctacattaatatcatctttttttgttaagtttaaattatcaataatttttatatttatagtgccaatttgattatctatagactgtagatttagattaacagacttaaaatgctctcgcttatctttgagttcatgaagatgattgctaaatacattgatacgccaaagctgctgttgatgggcgtgtgttattgcttgaatgagtgtatcgtattgtgagatatgattatcgcataattttaagtttttctttaaattttcgctgtcaatgcctttaattttttgttgaatggtgtcaatatcttgtaccaaagctgactgatttgactgagtttctttgagtaaattttgtgtagatgtatagtcctgctttgttttttcaagggtttggatcatgctttgatgctctttacgcaaagaggcaatatgttggtcaagcctgcgaaccgcttgcaaagttggctttaaattttcataatcatcagttattttgttaaatttttctttaagctcactgtgtgtttgcctacgcttttgatggcttaattggatttcatttaagcgatgatttagtataatcaattgatcttgtttattgttatactcaagatggtactcatgaaacgctgtataaagtggctgcaaatttttggcatcatgagcgtgtttcatgcgctgtatatttggctcaaagtttgttaaggcttcttgatgctcgatcagttttgcttgataatgagccatttcctgatttaaggtttggtattcattggcaattttctggcgatcgctcatcagcttaatttgtgtttcaagcaagtttttttgttgtgtgatttcgctaattttcttaattaatccatcatattcttctgtatttaataaattgacttctcctaatttaatttgtagattttttaataaattaagctgttctttatgcttttcaaaggccgcttgaccaattttggcatagatgtgtgtgcctgtaatctgctcaagaatttgaccacgctcagtggcatctgactgtaaaaacgctgcaaattcaccttgcacaagcatgaccgaccgagtgaattggactttattcatgcccaaaatacgctcaacttccttattaactaagcttgctttttcttcaagaatttctccatgcgtgtcgtcggcatgctgaagtaagctgatttctcggctgacggcttgtaaattgccatcggttttttgtttggctctacgctgtgaccaactgacctgataaattttgtcattagcacgaaaaatcacgctactggctgcaaaagcagtaccaatactcatcagctcattttgtgtggcagaaatactcagacggggcgtctcaccatacaacgccaaacaaatagcatctaaaatcgttgttttgccagcacctgtggggcctgtgatggcaaatagagcatggtgataaaaagcggcatcttcaaaatctatttgccatttgccttttaaggagttgatattttcaaagctgagttttaagattttcattttgatttaacccttaaaattagacggctttatgatcagtttcttggatggctttgattaactcttgataagcaccaatgagatcatttttttcatcttgatttaagttttccttatcaagccgctgataaaaaatatccatttcatcaagtgtttctaaatttagggtaggggtgtgcaattttaggctaccttgatggatggctttatttttgatactaattgcagcgatgtttgagccttccagcagattggaaatgtgctgttttaaattagcgactaaggtgtcgccaacatattcaatctcaagccaaataggctcatcatgtgtttttagtgtatcgatggcgttggtaataaacgccatatcgccacagattttagcaaggctatgaaaaattggcacaggtaggctatggattgatatggcattgttatcttgattttcgccatgcaaatcatcattctttggcaactttgatatcggtacacttttattgagtggtaaatcaacaatcagcacttgtttatggcgtccaatttccccaaatcccatcgcaattggcgagccgctgtagcggatgtggtttttttgaccaactttttgggcagcgtgaatatgaccaagtgccacataatcaatggcatcatcaaaaatctggctactgatctgaccaagtgttccaatctgaatatcacgcatgccatcatcggtggatgagacagcagcaccagcagcataaagatgccctgtggcaatgatggggatggttttttggtgagtgtgataaacagcttgctgcttatccttggcaagattggttaaagagtgataatattcggccacaccctccagtaagagctgatttttttggtggattgagttggcatcaatcccacttctgacatcacgatcacgaatataaggcactgccatcacgatggcacttgggatgcctacatcatctgttagaacgatgagctcatcagatttgtcttggctgacactgccaatcacatgggtatttagcacgccgagtacttctttggttttttgtaggctggtgggagagtcatgattgcctgcgacaatgatgatgtgctgaatgtgatttttaaaggcggaggcaagaaagtgatggtaaaggtattctgcacggttgcttggcgtcatggtatcaaagatatcgccagcaataattaaaatatccacctgatgtaatatcaaagcctcaatcagccaatctaaaaatttagcaaattcatcatagcgtgactgattgtataaaagcttgcctaaatgccaatcagatgtatgtaatagccgcagcgaatccttgggcttgggtagggcaggcacaatggggctttgatgggttagatgtgttttaaatatcgtcatgacagttgccaaattatcaaaaaaagaccgcaaacagcggtcttgggtcaaacagcggtacgcacagttgcagctttatccaaagcggtatacaagcgattgacttgatcagcatcggttaaatacaaattcacgcgtacagaatgaaagcgacctgtgcgagatggacgaacctgcatggtcgctgcatcaaattcaggaaaaatttctgctaaaattagtttgacttcattgatcaatgtttcatgatgtccttcgtgtccgatgatgctcatgggataatccataggaaaattccaaagctcaggcgtttgaatttcggtgcgtgttggggtttttggcgtattggtcataagttatcctaaatgattttggtgtagagataagatgggggaattttgtcaaaattaaagtagtatcatcaaaagctagccgattaaaaattccatcactgcctttgagccgacaaaaccgatcgccagcaataaaaatccatataccgcaaaatttgcggcacgcttaccccgccagccgtagcgataatgaccagcaatcaaaagcccatataatagccagctcagcaagctaaataccatcttatgtgccaaatgttgatctaagatgtcataagttgcaaccagaccaaacccaagtgcgatactcaaaatcacaaatccagtcagcaccatatcaaacaaaagactctccatgctctgtaaagacggcaggcggctgacccaaaagcgatgaatggttttgcgtttaagctcacgaatttgtaagcgtaatagcaccccttgaacggctgccatcagtagcacacaatacgcagcaaatgatagcaaaatgtggatttgtagagtgtttgataaatccgtaagtggtttgtaagctacttgaccaaaatagcccaaactcaccccaaccgctgccatcggcaccgccaaaatccctaagcttaaaattgggcgatacagaccaaataatacataaaatagtacaaaaaataggctagttaagcttagcgtgttaaataagttaaagtttagtccgtagagcgtgatgatttcaggtgtcaacacccaaccatgtaataagatggcaaaaatcaatatgccaagcaccaaccgatgaatcggtgtatcttgaaataaggcatatgccaaataaagacctgatcctatataaagtatcagacacagtaaaaaaataacaagcacggctacccctttgttgatgtctgattaatcatttggataatatcggtaaaagaattttgctccaaatcctaacaatcagcataaatcgtgcaattaaattggaatatttacctaatttagcataaaatagcaggtatttgtagcaatactaagatgcatatccaaatgatgacagataaatcttaatcgatgtccaaactttgaaataacacattggaaaaattatgtttgatactttaactgaacgactctctggtagtttgcgtcatatcgcaggtacaggacagctgaccgaagacaacatcaaagatactctaagagaagtacgcatggcactgcttgaagcagatgttgcattgccagttgcacgcaactttgtcgcacgcgtcaaggaacaagcacttggtcaagaagtactcaaagaactcgccccagggcaagcgtttgttaaaatcgtttatgatgaactcactgagatgatgggcagtgccaatcagacgcttgagatgacgggcaagccgcctttggtgtatctgctggcaggtttgcagggtgcaggtaagacgactactgcaggtaagcttgctaagtttttgcaagacaaacaaaacaaaaaggttatgctggtatcagctgatatatatcgtccagcagccatcaagcagcttgaacaggtggcagcacaagtcggtgcaagctttgtaccttcgacgactgatgaaaacccaattgatatcgcacgccgagccatcgatgaggctaaacttcagtatcaagatattttgatcattgataccgcagtcgtctgcatattgatgatgagatgatgagtgaaatcaaggagttaaccaaggcagtcaatcctgtggagacgctgtttgtggtggattcgatgacaggtcaggatgcggccaatactgccaaagcatttaatgatgcactgcctttgacgggtgtgattttaaccaaaaccgatggcgatgcgcgtggcggtgcagcactttcagtgcgtgcaattacaggtaagccgattaagtttttgggtcgtggtgaaaaactagaagcgcttgagttgttccacccagagcgtattgctcagcgtattttaggtatgggtgatgtgctgtctttggtcgaggaagttgaacaaaaaattgaccgtgaaaaagccgaaaaaatggcaaaaaaaattcaaaaaggtggcgagtttgatttagaagacttactgacccagttccagcagatgaaaaacttaggtgggatggcaggctttttggataagatgccaggcttgggcggtgctgatatccaaaaagccatggaagaagctcgtcctgaagaaaaagtcaaagaaatggaagcactcatccactcaatgacaccgtttgaacgccaaaatccagataaaatcacaccaagtcgcaaacgccgtatcgctgcaggctcaggtaggcagattcaagatgttaatcgcctgctcaagcagcacaaacaaatggcaaaaatgatgaaaatgatcagccgccctgatgggattggtaaaatgatgaaagcggtgcagggtctggctcgtggtatgtcaggtggtggccctttatttggtaataaagacactaatcaagcaggtacgcccaatatgcaagacatgcaaaaatccatgcaagatttgggtctaaagccagaagatatgcccagcatggaagagatgcaaaaaaagatgcaagaaatgcaaagtcagcttccaccaaactttaaaaagcgtttttgatgggtggtggctgttatgtcaaatttaatggcatttgatacggtatttgagcaatgttcgattgcacttttgacagatgatactgtaatttatgaacagactgtggcaggcggtcgtggtcaaaccgagattatcttatctttggtggatgaggcgttatctcagacgaatattaagttatcaaacatagactgtttggcgtttaatcgtggtcctggtgcatttagtggcattcgcattaataccgcagtggtacaggctttatcggtggcacatgaaactttgtgcgtgggtgtttcaagtttggctgcgttggcggacacagcacatcagatacaccaatttgcagaatcatcgtgtatcacggcggttatggatgcacgccaaaatcaagtctatgctggtaattttatgattaaacatggcaatattcagccaatcgtagatgccagcaatgcctatggtaacgaatttttggtagattatggcagtgccgtgcctgctgatgttatcgtcggtgatggcgtatctttgattaacacaaatgccaatattaaactaaaaattcaaccaacagcaagcgatatcgctcgattggcttggggcgaatatcaacaaggttatgcggtgcgtgcagaacacgctttacctgtttatctcagagataatgcttggaaaactttggctgagcaaggtaaatgatggctatcaaccgcctttatcatgagtgcatgttggataataaatagcaatatttatatatttctaatagccaatcaagcctcattaagctgctggctatttaagttggttgaagcggtggcattctattttttttatttttgagatgattgatggatattttgctaattatcaaggcgatcataatgggtgtggtggaaggcattgctgaatttttgcccatttcaagcacaggatatctgattttgtctgcagatatcatgaattttttaagtggtgaatttcgcaatttattcattgtatttattcaattgggtgcaatcttggcggtcatttatgattattggggtaggctttggggtgcgttcatgggattggtgacagggcattcatcagatcttaccaagccaagacagcttggcttttctttgatgattgcaagtttgcctgtggttgtggttggttttacgatggcggattttatcaccaatgcactatttcatcctttggtggtggcgaccatgctcattttaggtgcattgattatcatttatgctgaaaaaaaccctcgtcaaatccacgcaccagaagctgaaaatattagctttaaaacagcacttggcattggtctgtgtcagtgcttggcattgattccaggtaccagccgttcaggttcgacgattatcggagcactgcttttggggacatctcgcaaggcagcgacagagttttcttttttcttaggtattcctgtaattattggtgctgcattgcttgatttaattaagcattttgatgcaatacaaaccttagctgattggctgatcttgctgattgggacgggggtgtcttttgttatcgcacttttgtgcattcgattgatggtggcttgggtgagccaaaaagactttatgatttttgcttggttgcgaattgcgacaggtgttttggtgttgattgcattttttgggtttaattatcaaatccaagcttgagtcatccttttaagtaataaactgacattttagagagcgattgtgcgattatcattgatttatgacaagccaaataccgtagtagatgagcttttgtctatctgtcaggcgtatgatttgccacttgactgggtggtacaccggcacaataagctcaatgataagcaaattttacagttgaaacaaactggtgatacacccatcatcgccatcttaaaaaacacaccaacattaatcaaagtcgaagacaaaacaatcgtcaaatctacgctaaattggtcagcacttcagtatcgcattgtgacagcagggcgtaaatcagagctaattttgcaggcatgtaaacctcaagcaggtatgacggtactagatggcacagcaggttttggtcatgatgcactaattttggcaagtagtggcgctcatgtgactttgtgcgagagcaatcctgtgatggcattactgctctattatgaatatcaggcaatggctcaagtggcaaattggcaaggacttttgggtcgtatggatattatttacaaagataccagtgagatgacaggggaatttgactgtgtgtatttagatccgatgtttcccaaagatagctataaagccaaggtaaataagcagatgcaagcgttgcatgaattggcagcaccaccaacacaatcagaagcacaccagattttttgtcggtcgatgaacatgattaaaccaaatggcagactgattatcaaaagaccaatcggcgcaccatattttgttcaacaaccaccaaatcacagcattcaaaacgacgcattaagatttgatcgctatgataaaaacggatactcagccttacatctggggtaatgatcatttatcaataggctggttatgaaaacctatttatttgggagaatttaaaatggatggctggatcatatgggcataccttgccttaaatgttttgatattaatacaaaatttcacacaaaaaactcgcatccaaaaacttgaagatgcgttgtttgtttataaaaaacaagaatggcttgagtacgcacaatcgcaagcaaatttaccacaagtcaaagccatcaaagccattcgtgccaaatttccagaaattagcttaaggcaagctgtgcagttgtacgtcatggtaagcccaccaaagaatcactcatgaaaaatcttaagacccacgcacctatgacggttaacgaaaagttcattgcatggctgcaactgacacgctttgataaacctgttggcactgagctgttattacatcccacgctttgggcattatttttggtctatgcaggtaaaaatgcattaccaaatttttggtatattgtaatttttgccttgggagcggttttgatgcgtgctgctggctgtgccatcaatgattttgctgaccgaaaggtggatggacaagtcaaacgcacccatacaagacctttggcagacggccggttatcaccaaaaacggcagcattcacttttatcggcttatcattattggcggcatgcttgctgttttttttacccaaatcagttttttattggtctttgggtgcggtattattggcatttatttatccgtttatgaagcgatttaccaatataccgcaattggtattggcagtggcatttggctgggcaattccgatggcatttgtcgctgtacaaggtgcgcctgatttatggacttgggtgctatttattgcctatatgtgctggacggttgcttatgatactgagtacgccatgtgtgaccgagatgacgatcttaaaattggtgtaaaatcaaccgccatactctttggtagatatgatgtcacaattatcataggtttgaaccttatctttacggtgctgatgagtgtttcattttggcattattttgatgatttgcccaaatggctgtgcattatgacatttatgcctgtgcttgcgatgttttttcggcaatatcagcttatcgccaatcgtgaacgcttagcgtgctttatcgcctttaaagaaaatgtttgggtggggcggtatattttgaccatgacggtgattttttgtttgatttattttagataatcttatcatgttataaatttataaaaattgactgcctattattttctgttattttaaagaaactttttggcattttgctaaattgtcatcaaattgtcataaaccaaatttataatttgtacagcttaagtaactaagccactgcataaaaaccttggaaacttaggttgtttgaagtggttttttcgtttatctttggtgaatttatggtaaattctacaaaacaagccacgccgatagcagtcaatctattttttggtttgctattggctggaatgagtatctattttatccaatggggcttggtctacacaatgcatcagcaggtgctattgtttatgattgcaagtttctttggtatttttatggcattcaacattggcggtaacgatgttgccaactcatttggcacatccgtgggtgcaggtacgctatcagtcactcaggcgttggcagttgcggcaatttttgaggtatcaggtgccgttttggcgggtgcagcggtcacagatacgattcgtagcggcattgttgatatcggtcaattgggcgtttccccaaatcagtttatttacttgatgctttcagcactcgttgcagcggcattttggctattatttgcaacgaagcgtggtctaccagtatcaaccacacatgccattattggtggtattgtgggcagttcaatcgtgcttggcattagtatcggtggggttgattttgcattttcaacggtcaaatggtcaaagattcgtgatattgcactttcttgggtgatatcgcctgtattaggcggggcattatcatatttattatacagtattattaaaaaaaatatattggcatataatgataaagcggaattggtcgttaagaccattaaagccaaaaaaaaggcacttaagcgtgaacaaaaagagtattttgagacacttgatgataaagaaaagttgccatataccaatgcgttgctgcgtgaccaagaggcttttaaagacggtgattgtcagcgtgatgatttagaaacccaatattaccgtgccatttttgaccttgaacgccgccgtgacaatcttgatacactaaaggctttaaagacatgggtgccactcattgccgctttgggtgcggtgattatgacagcgatggttgtatttaagggtttggcaaatacaggtttacaattatccattctccaagctggtttggtgatgggtatgctgggtgctttggtatggttgaccgcttttatttataccaaaaccattcgtggtaaacataaagaagccttaggtaaagcgacttttgttatgttcagctggatgcaggtatttacagcatgtgcctttgcttttagccatggttccaacgatattgccaatgcagtcggtccttttgttgccattatggatgtgattaaaaataacgcagttgaggctcaggcaacggtgccagcacctgtcatgctaacctttggcgtttcactgattgtaggtttatggtttattggtaaagaggttattcaaacagttggtaccaaccttaccgaaatgcatccagcttcaggtttttcagcagagcttgcagcagctgcagttgtcatgggtgcttctagcttgggcattcctgtttcaagtacgcacattttggtgggcgctgtgcttggtattggtttggtgaataaaaataccaattggcgtttgatgaaacctattggtttggcttgggttattaccttaccagcagcagcaactatcagcgctatttcattcctattgcttacatattttctttgattgacagcacaaaacggttattttataggcttgtgttaatcttaagccgctaaatccctttggatctgatatttaaagggataatgttttttatttttatgatttaatttttatgataaaatcaaatgtaaatatataaaataataataaattttaataaaattaaataaattaaatctaaaaatagataaatacaatcgctaaaagggttgatattgataatctttgcccttaaattgttgcttggtttttcttaattatataatttctatatttgtcattaagtcttataaatgatcgtttatcgcatcaatgaattgccttataattcattaataatcaatacctttggagaaaatgatgaaaaccgtctttcatgccgctgattctcgtggtgatgccgaacatggttggctaaaaagccgtcatacctttagctttgcagagtattatgatccacagcgtatgggctttggtgtgcttcgtgtcattaatgatgattgtgttgaaggcggaatgggctttggcagacatccgcatcaagatatggaaattatttcactgcctttgagtggtgatttggcacacaaagacagcatgggtaatggcagtatcattaaaaatggtgatatccaagttatgtctgctggtacaggcattactcacagcgaaatgaatgctaacgctgataagccagtgaagtttttacaaatttgggtcttaactcgtaaaaatggcataaaaccacgctatcaacaagtcaccattgccgatcaagccaagccaaatgattttcaacaaattttatcgccaaatgcagatgatgatggggtatggattcatcaagatgcttggttttcattagccaactttgataaagacaccagtcgctactatcaaatcaaaaagtcaggcaatggtgtttatgtatttgtgatcaagggtagtgcaaacattggcgatcgacaacttggcgagcgtgatggtttgggtatttgggatgtggatggttttgaattgactgcgaccagcgacgcccaaatcttattgatggatgtgccaatggatattgcacccaataccaatcagccttaattcatttattcattaaggtaaggttttattgatgccgttggtatgattatgattgttgtcaaataaaaattaagcataaaaaacacgcccagtaatttactgagcgtgttaaaatattggcatcccataggggattcgaacccctgttaccgccgtgaaagggcggtgtcctaggcctctagacgaatgggacacagtttgcaaagcctaacctttgctgaatttcggtgctttcaccattgatccgaaattggttgccattatatcatgatatttttaatcgtcaatcattttatatgaaaattctgataaaaattactaagtcattgatttttaataaaataatttggtctactagtctttaaaattattaaattgtaaaggcaccccaaatgtcttttcttttaaaaaagccatagcaagttgcagattatcttttttcttatcactgattctaattttatcgccttggatactggcagatacttttaaatcagattctttgagtgtttttgagatttttttggcggtatcgctgtctaagccatcttttagatggatgatttgcttggtttgtttccctgattggcttttatcttgtgggtcaagtgattgtaaatcaacgcctcgtttaatcaattgtttttcaaaaatcgcatacacattatctgattgtaattcattatcagtggtaatggtaactgttttggctttttcattcagttgaatactgatatcgctgcctttaaaatcaaagcggttggcaacctctttttcagtattttgaactgcgtgcttaacctcaaaaacttgtaattctgaaaccacatcaaaagatggcatgataattctccttataattggttttaagtaatttttaaatttatccatcaagtcagcgatggcgtctgatgggggctggttggcgtgtcattttgagttaaattggcatgattggttgataaaagtgtattttgattgacaatatggcaaaacagttcagcagttttttgggcatcgtatagtgctgaatgtgcatgttgattatcaaattcaagcccagcaatcatacaagtttttgccaaaacggtatgaccataagtcaatgcagcaaaactcaccgtatctaatacgctaaaagtatgaaagggtgaatggtttttgctattggttcgtgcaatggcagcatttaaaaatcccaaatcaaaatgtgcattatgcccaaccaaaatacactgacggcaaccatgttctttttttagggcttttaatgctttaaaaatacgacgcaaggcggttttttcatcttcgctgatggcttttctaaaggggctatcaggattaatgccagtgaattttagagcagctggctcaagattggcaccatcaaatggctcaatgtgtgcatttaatggctcaccttgataaagattcccatcattatccatcaaaatcggcacacaagcaatttcaagcaatgcatcggtggcagcattaaatccagcagtctccacatcaatcacgactggcaaaaatccacgaaatcgttcagcgatgagagttttggttggtttgactatcttgctcatatgccaaccacttgccaaggtaaaacttcacctgccaacaacggtgtcagcgtcttatcacccaaataatgaaaactctcaggtatggtctgtggttgttttattagggtgatttgagtggtgttgattgctaagccataaaattgtgcaccatatcggctggcaaagttttcaagtttatcaagtgcattgacactttcaaatgccatggcgtagagtggtagagcgtgcaaggcactataacaacctgcacagccacacgatgattctttcgtgtgtgtggcatgaggggcggaatctgtccctaagaaaaacttaggattgccactggttgccacttcaagcaaacgcttttggtgtgcagcacgctttaaaatgggcaaacaataatagtgcggcttaataccgccaaccagcagatgattgcgattaaataaaagatgctgcggggtaattgtcgctgcgatgtgattgccttgagcaagacaaaaatccgctgcatcggcggtagtgatatgctccatgacaatttttaaattcggaaattgtgtgataattttatttagcacatcatccaaaaatcgtttttcacgatcaaagatatcaatgttgctatcggtaatttcaccatgcaccagtagcggtatgccatgcttttgcatggcctcaaataccaagctgcgtgccaaaatatcagttacaccatcagctgaattggtggttgctccagcaggatatagcttaactgccgatacaatgcctgtttgtgcggcatcgtcaatatctttggcagtggtttggtcggttaaataaagcaccatgcgtggatcgaaactatctttgcgagtggctggtaaatcactgtcttttaatgcctttaagatgcgttcacgataagcgatggcttgattggcagttttaacaggtggcaccaaattaggcatacaaatcacacggttaaaactggttgccgcatgccgaacggtggttgccagagcttcaccatcacgcagatggatatgccagtcatctggctgaatgagagttaatgtctttgtcatcatctactttggtctaaaagtatacaaaaaattcattattgtagggattggtatttttgtcaaggcttaagagcaaatttgataaaaatgacagctgatatccaaatttaggctgcttatatcactaagtggagatatcaaaaactcccaattgcttgattgggagttttttaagattagtgtttatcttgatagtcaagctgtggtacagcattgccaccaccgaagcctaataatcctgattggacatacagccccaatttttggcgtgtatctgcaatatctagattacgcatggtgagttgaccgatacgatcaagcgatgtgaaggcagcatcttcaactttttccatagataagcgatcagcttcataggttagatttggtgatttggtatttaaaatgctataatcattgccacggcgtagctcaagcgtgacttcacctgtgatggctttggcaacccatcgttgagcggtttcacgaagcataagtgcttgtgaatcaaaccaacgcccttgataaagcagacggcccaaacgcaagccattaatacggtactgctcaatggtgtcttcattgtgaatgcctgtcagcagtcgttcataagcgatgtgcaacaatgccataccgggagcttcataaataccacgagattttgcttcaatgatgcgattttcgatttggtcagtcatgccaagcccatgacgaccgccaatctcatttgcctttaacatcaaatcaacagggctatcaaaatgctcgccatttaacgctgttggcacaccttctttaaaactgactgtaaccgtctcggtagcaactctgacactgtcatcccaaaaacgcacccccatgattggctcaacgatgtgcatgctggcatctaaaaactccaaatctttggcttcatgcgttgcaccaagcatgttagaatccgttgaataggctttttcagcagacattttataatcaaagccattatcaatcaaaaactgactcatctcagtccgaccacctagctcatcaatgaatgtttggtcaagccaaggtttatagatttttagttcaggattggcaagcaaaccatagcgataaaatcgctcaatgtcattgcctttataggttgaaccatcaccccaaatatgaacatcatcttctttcatggcagtaaccagcatcgtccctgtcaccgcacgacccaatggcgtggtgttaaaataaggcatgccacctgtggttacatgaaatgccccacactgaatggcagcaatgccttcttgaacaagctgtaaacggcaatctaccaaccgtgccttgaccgcaccatattgtttagctttggtaggaatggcattgtagtcatcttcgtctggctggcccaaattggccgtgtaagcataaggcagcgcccctttttgcttcatccaaagcagggcagctgaggtatccaaaccacccgaaaaagcgatgccgacttttttaccgataggcagatgctgcaaaatagttgcgttgctcatatgaatatccttgatatatggctaaataaaattatcaataaattataacattttttatgatgattggatatgaaacctaagataatttgctttttgttgtaaaaatatgagttttataacactttattatgccaaatatgcgatgcttttgttatactatcattttaaaaaatgatagctattatttaggaattaattatggtttaggagttaatcatgactatagatcggcgtatcgtgattgacacccaatcacagtgcttaactttgtatcaaggtaatattttgttgcgtcaatttgccgtttcaaccgcaaaaaacggcacaggtcagctagagggtacaggttgcacaccacttggtgaacatgtcatcggtcaaaagattggcggtggcttgcctcccaatgccgtgtttgttgcaaggcaatttactggcgagctttatgatgtacagttgggtcaaaatttccctaatcgagattggatacttgggcggatattgtggcttgaaggtcaaatcaatggctataatcatggcgtggataagacaggggcattggttgatactaagttacggtatatctatattcacggaacgcccgacacagagcctatgggtcggccgatgtcgcacggctgtgtcagaatgcgtattgatgagattgtttggttatttgataaggttgaggttggagatttggtactgattcaatgatacaccatcttaatacgatgacttgataccacaaagatggcatttgccaaagtaaaagtaattgacggttgtcagatatcatcattgcaagaaaaataatttttgttgatcacaccaattgattaaagcaccacctaaaggtagttgtatgaatttacaaaaagttgacctaaatttattattttatttagatgtcttattacgagaaaaaaatgtcactcgtgcagctgaacagcttggcatcacgcagcctgcaatgagcaatattctacgccgactacgctcattatttaatgacccacttttggtgcgttcatctgagggcatgacaccaactgaacgagcttttgagttacagccacgcattcgtgaggtattgttagacatcacaacattacttgagccacgcaccgagtttcgtccatatagtacttctcgagtgtttcgcattatgaccagtgattatgcagaagcaacactggtacctcgtttggtgaaagcgttgcgtagtgaagcacctaatgttatcttggattttttgacgccatcagatgtctcttatcgagacatggagcaagggcgggtggatttggcgattaatcgctttaatgagataccacaaagctttcatcaagttttggtttggagagatacattcagctgccttttatcggcagacagttcctatgccaatcgttttaatttaaaaaattacctaaaagcacaccatatttgggtatcaaagacaggtatgggcgtgggatttggtgtcaatcctgaaaagtcaggtggtcttggctccattgaccaagcactccaaagacttggtcaaaagcggcaaatcagtgtatttactaggcattatcagatgcctgcaatgcttgttgcgaataaagatttaattgcaacactgcccacacgagtcgctcgcttacaagcagataatcatcctaatattatcatcaaagaaccgccattttttattcccgagtttgagctgaccatggcatggtcaccgcttcttcagcatcatcctgctcatcgctggttacgccagttaatcttgcatgtcgcacgacaagtcattgctgaagaaaatcaagtcatcaaagcatagcagccatctaaggtgtctttaagcaatattttatggtttggcagaagggcgtttattgcgttggtcgggcaatatgcgacgctcctcatcaaaacttgacagcggtaagaagataatattgctttttggtaaattttcgtgctgaattaatcgccagttttgtggcttggggctactgatttgcaagtaatatttggcaggggtgtcatcaagttgcactttgccaacatacacattatctttttgatggacaatggtaaaatcacgatcttttgtatcgtcagtggcatgcgagatatgcaccgataactcatctgggtaggttaatggtgtatcattatgaaagttttgggttgaaagattttgggtgggataatttaattcaaagcgtatatcggttgtattggcatgccaagatagtcgcatgacaccaaaaacgcccaaatcatgtgctaattgatcacgagatgagtcttggtataaggttttgccatccatataccaatcatcacggacggttgagtcttgaatttttatggaataaaaaataaaaaataaacaaatcactacaaccaacacaggcaatccaatgacaaaaattaaaaccatatagtttttgtaccaaatatttgcctgtttattgggtttgggtgtcagtttcatgatatttgccaatgattgtcatcaaagtaggttgagctaaaatgggtcttattgtagcacagtcagacccatttaggtgaaaaaccaagcttggttgttaaggttagttatttgggctgcttggatttttttggttcgtaaataaagacatcttgagctgatgcactgtattgaccatctttactatatacagtgatggttacaggtgtgctgccaggcttgatgatatttgggtcgccgatgatgctgacaggcaaatcgtacagctcactggcttgcaatggtaattctttaaagcgtgagcgtaaagtcatgccagctgcattctctgcatctaaacgaacttgataaacttggcgttcattggttttgttgacaatttttaagacatagctattttcaaccatgccatcacgcctaatggttgagagttgtttacggtcatggcggatttccatctcaaggggtgcacgactaaccaataccatcgttgcagcaatgatacaagccaaaagtacaccagtataagcaaaaatacgccatccgataattttggtcttttgtttttcaaccaattggcgttcggttgtataacgaatcaaaccccgtgggtaaccaactttgtccatgatttcgttgcatgcatcaatacaagcggcgcattggatacattcaacctgaagcccatttcggatatcaatgcctgtggggcatacctgaacacacatggtgcaatcaacacaatcaccatagcctgcaggtgtggtatctttcttacgcgcaccacgaggctcaccacgctcataatcatatgaaacaatcaatgtgtctttgtcaaacatgacagattggaagcgaccataggggcaaatgtacacgcacatatgctctcgcatatagcctgcgttggtttgggtaacaaagacaatcagaataaaaaatatccatgtcatcttaccccaacccataaaaaataaagggtgtccattaaaaaataaatagtctgtaccaacaataaatgcaataaaagttaccgcagtaatcgcagaaagaacaccccaaatggtatgaataagggcagttttgataattttttcggcattccaaggcattttatcaaatttaatacgcttgttacgctcaccaagaatccatttttctacatgctgatacagatgcacataaatggtttgtgggcaagcgtaaccacaccaaacccgcccagcatagacagttaccataaatagcattaaagcggcaatgataaacacaaatgcaaagaagtaaaaatcttgaggcataaaagttgccccaaaaatataaaacttaggttcgataacatcaaataaaagtgcttgtctaccatcccaacgaagccaaggtgcgattaaaaatcccagtaaaatcaaatacatgctaattaggcgaatgttggtatatttgcccttagcaaagcgtggatgcacacggtgcttggttgcatccatatctttggaggtgggaatgattttttcaggggcagggcggggttttttctttggtttttgttcttctgacataacagataccttggcttatggcccaaatgaattaaaaatcgctttacttgctagaagcatttttgttaaggcatggcttggtaaataaaaaacaccaaaacggatagttggtaacttatcttatattaccattttttgtagggtttttgtatgatattttgacattttataaaaatatgcaagttatatttttgaataaagatattcttaaatgataaaaataagtatttatgacatacttacctaaatcaaaacaaaaccccatcaggctaattttgatgggggcgtttgaagtgtttttacagtcttttacttcaaattctttgacttaaaattcggttatttgcagaatttttttaaatagctctttttgttcttggcttggtttggcagattgtagcgtcatgatttgagacatatcaccatcaatacgaattttgccaagcataaatgcttcaatggcttgattggcatcacctgttgcgatgagctgtgataatgtttcgctatcaacagtgacagtgctgatggcattttctgtcaaaccttgaaaaattttgccttctttgaggtgtagtttggcaccgtcatcgccagtaactttggcatttaataagacattggctaaatttggcggtagatttaaattgcctgcagcttgattgagttcattgacttgatcaaaccatgcttggcttaaaaattttgccataataattgtccttgactgtttgataatgtcggttaaggttaaaaaaagacactatgctttaatttgatttgtatatttgagatattataaagcaaaagcactgatttgtcacaagcgtctttgaactagtttaatctcgtacagttaatataactcgtatagttaattaaaatgagttttggttaataattaaacattaaaataaattaaataatcataagaaatttagctttattaccaaaaaatctcaatatttttacaaaatatacccaaaaattacatttgtgttgtataataaaagatgaataacttttggcaataccacattgccagtatgggtatatttggtgatggcagattgccacgccaccaacgcaagccaagcagttttgcaatccaagctagcaaggaatttcaaatttcaacctaaaatttgtccatattccacagaaaaattaaggattttttcgtttttgctggctgatttgatgatatttgcctaactttgcgttacaatagacacacaagatcaaagcaagagtagttttttcactcgatttgataaaactgcgacgctaaataaatcgggctgcacaggaaaatatccaatgagtctatataaatcagcagtagcccccttatccgttgatcatgaatatgaaatcacgatcgtacgattttttacaatcatggcggtattttggggtatcgttggcatggctgtcggtgtattcattgcatcacagttggcatggccagtattgaattttgacacatcatggctgtcttttggacgactaagaccactgcataccaatgcggtaatttttgcgtttgggggttcagcactttttgcaacatcttactatatcgttcaacgcacttgtaagaccagattatttgcaccttatttggcatggtttactttttggggctggcaggctgttatcgtttctgcggtcatcacactgccattgggtgtcacctctgccaaagagtatgcagaattagaatggccaattgatatcgccattgcattggtatgggtcgcttatgccattgttttttttggaacgctcatcaaacgccaaacctctcacatttatgttgcaaactggttttttgcagcattcatcatcacgattgcgttgctgcatattgtcaatagcttggtcgtaccagttggcttatttaagtcatactcacttttcggcggcgcaaccgatgccatggttcaatggtggtatggacataatgctgttggtttttatttgacagcggcgtttcttggtatgatgtattactttattcctgtacaaattggtcgccccgtttattcatatcgcttatcaattgtgcatttttgggcattgattgcatcatatatgtgggcaggtggtcaccatctacattactcggccttgcctgactggacacaatctttgggtatggtgttctcattgattttatttgcaccatcttggggcggtatgattaatggcgtgctgacactttcaggtagctgggataaattgcgtacagacccaattatccgtttcttgattgtggcactatcattttatgccatgagtacttttgaaggtccaatgctctcaattaaagcggttaatgccattagccataatactgactggactgttggtcatgtacattcaggtgcattaggctgggtgggtatgattaccatcggttcaatttatgtgctattgcctcgtatctttaataaggcaaaaatgtattcaaccagcttaatcacactgcatttttggcttgcaacaacaggtacggtattgtatatcgttgcactttggatttcaggcattacccaagggatgatgtggcgtgccactaacccagatggtactttggcgtatgactttattcaaactgttgtggtctcacattggccgtatgttgtgcgtgcattgggtggtgctttatatgttggtggtatgtttgtcatggcttataattgctatcgcaccatcaaaatgccaagcgtgcctgaacatatcgcagagccagaagaggtaaatactggcagtgaacaagcaacggcacaggcttaaggggtaaacaatgtctaatatcactcatgaattagtagagaaaaatacaggtttactcgtcatctttatcgtcattgctgtcagctttgcaaccttggttgaaattgtacctttgatttatgatgaaaccgttgctgaagaaggcggtgtaaacaaacccatgccaaatatgcgtccttggacagcgcttgagcttgaaggtcgtgatatttatatccgtgaaggttgccatgtttgccatacacagatgattcgcccattgcgtgcagaagtggagcgttatggtccgtatagtcgtgctgcagaatcaacatgggatcacccattcttatggggttctaagcgtactggtccagaccttgcccgtgtgggcggtcgttattcagaccagtggcatgttgaccatctgaccgaccctcgttctgttgttccagaatctgtgatgccatcttatccttggcttgcgaccaatgaagttaatgggacaaaagtacaagaaaaaatgcgtctgtttaaagatcgttttgggttaccttatacagaagcagatattgaagctgcacctgaccaagttcaaggtgcaaccgagctggatgccctggttgcttatttgcaacagttgggtattgcgatgcaaggtcaacgctaatgaattggggcgttttgcatagtattgcgaccgttgcggcgtttatcacctttatcggtatcgcatggtgggcttattccccaaaaaataaaaaacgctttgaagaagatgcacaacttgcgctggatgatcaggacatacaacgcctatcatcagataagcgcactaaggatatacaatgagctttttttggagttcttggattaccatcttatcattgggctgctggctattcatctttggtgttctggtatggaccttacgatctagaccagttcttgaagaagatgagaccacaggtcactcatatgatggcattcgagaatatgataaaccgctgccaaaatggtggttggtgattttctttggtacgatgatttggggcttgggttattttatcctttttccatcaattcagccaaatacatggaaaggcgtgacaaccgttgaggtggatggtgagtctgtaccttggacttctgccaatgaactaaacagccagcttcaagctaacaaccgtgtatttactgaaaattttgagcaaaatattttggaaaatgcaggtgcaagtgaggcaactgttgtccttgctaaactaaatgaccttcaatcacagcgtaaagctggcgaagaaaatgccgaactacaaacacagattgatgaacaagtcaaactgctggcaccttatgttgataagctggcatcagatccagaagcacaaaaaatcggtaaccgtttatttttacaaaactgtgctttatgccatggatctaatgcaagaggtgcacttggttatcctgatttgacagataatgattggttgtatggtggcaacgctgaccaaatcctactgacaattcataatggtcgtgttggttcaatggcagcatggcaacaacaactgggtgaatctggtgtccgtgccgcagcggaatatgtgcttcagctttctggtaatcaaaatgactatgagcttgatgctgctaaagttgcacaaggtaaagtattgtttgaggcaaattgtgtggtctgccatggtccagatgccaaaggcagcgctgccattggtgcaccaaatctaacggatgatatttggctatttggtggtgatcgtgatgccgtccaaacttccattcgccatggtcgtgctggtgtgatgccagaatggcaaaccaaattgggcaatgaacgcattatgctgctggcagcttatgtacgctcactatcacaaactgccgctgaataagtttggctaatgttttaagagtcgcttttgcggctctttttattgatggtgaagtgattggcaattttaatgctatgatttatttgcagagaaaaatattccccaaacccctatatttttttgatgatttttagtaaaattctattttaccagcaacagatatattactatgagtacgaaatttatctttgtaaccggcggtgtcgtgtcatcacttggcaagggcattgctgcagcttccattgcggctgttttggaggctcgtggtcttaaagttaccatgaccaagatggatccttatattaatgtggatcctggcacgatgagtccatttcaacatggtgaagtcttcgttaccgaagatggtgcggagacagatttggatttgggctattatgaacgctttttacgccgttcaaaaatgagtaaagccaacaattttaccagtggtcgcatttatcaaaccgtgcttgccaaagaacgccgtggcgattatttgggcggtactgttcaggtaatccctcatattactgatgaaatcaagcataaaatccgtaccagtggtgagggctatgacatcgccattattgagattggcggtacagtgggtgatattgaaagcttaccttttatggaagcggttcgccaaatgcaagttgagcttggtcgcacacattctttactgatgcatttgactttggtgccttatattgcttcggcgggcgaatctaaaaccaagccaacccagcattcggttaaagaacttcgctccattggtctacagcccgatgtattaatttgtcgatcagaacaacccatttctgaagataaccgtcaaaaaattgcactatttacgaatgttgagccacgcggcgtcatcttatgcgaagatgccaagtccatttatcaaattccacgccgcttatatgagcaagatttggatgatttgatttgtgagcgttttggtatcacagcaccagaggcggatttgtcagattgggataaagttgttgatgatttgttcaactcccaaggcgagatcgtagttgctatggtgggtaaatatgtcgaactcccagatgcttataaatctgttaacgaagccctacttcatgcaggtattcacaataaaacaaaagttagcattcgatatatcagtgccgaggccctagaaacagattcagaggcaatgaatcagattaccgatgtggatgcgattttggttccaggtggctttggtgagcgtggtactttgggtaagatgaaagccattcaatttgcgcgtgaaaataacaagccatttttaggcatttgcttgggcatgcagcttgcagtcattgagtatgcgcgtaatgtattgggcatagaagcaaattctaccgaatttgatcgaaaaacagccaatccgattatcggcttgattaccgaatggtttgatgaaaaaggtgaacttcaaacccgctctgatgatagtgatttgggcggcaccatgcgcttaggtgctcaagaagcagaattggtttcaaactctaagcttgctaagatttatggctcacataatatcaccgaacgccatcgccatcgttatgagatgaataatcgctatattgagcctttggaaaatgctggtatgaaaatttcaggctattctgccaaacagcatttggttgagtcggttgaaattgacaatcatccttggtttgtggcggtgcaatatcacccagagtttaccagctctcctcgaggtggtcatccactatttaatagcttcatcaaagctgccatagatgtgaaacaagcctaatcattaagcacatcaaacgctttggctttgatgtgctttttactattttttgtgtttttaaatgtacttggtagtataatgacaaaaccaaacttgtaacttatgcaggataaataaaactgtaaggatttgagatgacacagccaatgatagccgctcaatcaaacattaccgtatcagggattgagattggtaatgataagccttttgttctatttggcggtatgaatgtgcttgaaagccgtgaattggcttttgagattgctgagcaatatatcgatatttgccaaaggcttaatatcggttatgtgttcaaggcaagttttgacaaagcaaatcgctcaagcttgcactcttttcgtggtccaagccttgagaatggcttgacttggctaaatgacattaaagaaacttacaatgtccccattattaccgatgtgcatgaaccttatcaggctgcacctgttgccaaagttgccgatatcctacaattacctgcttttttgtcccgccagacggatttggtgagtgccattgcacgcactggcaagataattaatgtcaaaaaagcacagtttttggcaccacatgaaatgcgtcatatcattaataaatgtttggaagctggtaatgatcaagtgattctttgtgagcgtggttcggcatttggttataataatttggttgttgatatgcttggctttgataccatgaagtcaatgaatgtaccagtattttttgatgttacgcacgcacttcaagagccgggtgctcgtggtgacagtgcaggtggcagacgccatcagattaccactcttgctcgtgcgggtatggcgacaggcttggcgggtttatttttagaagctcatcctgatcctgataaggcgaaatgtgatggcccaagtgcattacgcctaaatcaacttgagccatttttgatacaaattaagcagcttgatgatttggtcaaaggctttgaaactttagatacacaataatagatacgcaaaattaaagaattttatcattaataagtgattgcgataggagctactatgtacgctgaagatacaaaaaatattgtagaaattaaagacattattgctcgagagattttggattctcgtggcaacccaaccattgaagcagatgttatccttgcaaatggtattcgtggtcgtgcagctgcacccagtggggcatcaacaggctctcgtgaagcgttagaattgcgtgatggtgacacttcccgttatttgggtaaaggcgtcaaaaaggcagtggcgaacgccaatagccaaatccgcaccgtactgcttgataaagatgttacacaacaaactcagattgataatatcttaattgagcttgacggtacagaaaataaaggtaatatgggtgcaaatgctatgttggcagtatcgttggcggtagccaaagcagcggccattgctcaatcattgcccctgcatcaatatattgccaatctgcgtggacaaaccagcttaaccatgcctgtgccgatgatgaatattttaaatggtggcgcacatgctgataataccgttgatatccaagaattcatgattgagcctgtgggatttgcttcattttcagaggcactgcgtgcaggtaccgaaattttccatgcattaaaatcagttctaaaagcacaaggtttaaatacggctgttggtgatgaaggcggttttgcacccaacttacgctcaaacgaagaggcaattactgtcatcatgcaagcgattgataaagctggctataaggcaggtgaaaatatctttttagccttagattgtgcagcatctgaattttataaaaatggtcaatacatcttggcaggtgagggcaataaagcctttgatagccaaggttttagcgattatttaaccagcttatgcaaccaatatccgatcatctctatcgaagatggtttggatgaaagcgattgggaaggctgggcatatttaaccaaacagttgggtaaaaaggttcaattggtaggagatgatttgtttgtcaccaatccaaagatcttgcaagaaggtattgataaagacattgctaatgccattttgatcaaatttaaccaaattggcactttaagcgaaactttagatgcgatctatctggccaaacaaaatggctatgccactgtcatcagccatcgctcgggtgaaactgaagattcaaccattgctgatttggcagttggtacggcagcaggtcagattaagacaggttcactgtgccgttcagaccgtgttgccaagtacaatcagcttttacgcatcgagcagcaagtgcgtgccgcttatcgtggtcgtgaagaatttatcggtctgcgtggctgatttgcgattttatcaatgatttgggaaaaacactgtggcaaatgtgaatcagatacttaagtatatggtgagtaatcagcttagactgattatcagcattattattgcaacagtggttttggtgctgatgcaaatacagtattggtatggtgattatggtcatgccaatttaattgctgtaaaaaatcagctgcatgaacaaaatcgcttgaatcaagagcagatcaataaaaacaatatcttattggctgatgtcaaagatctaaaatcgggtctttcggcaattgaggagcatgcacggctggaccttggtttaattaagcctggtgaaacatttattcagctgtcaaatgcaccaattacttattcacgccagcccttacttgaaattgatgagagtatcgaggctgttgattctgtaccagaacccatgcccaatcactgatatacaaaagtttttgatcgccaaactgtttgatctgatttggcgatttttattatttgatgacttatgaaaacaacgatttatccgctcattgtcgctgctggcacaggatcaagatttggtgccaataaacccaagcaatatcttaaaattggtactaaaagtatcttgacacacagtatttctcgattaaatcaccccgatcttgatgctttgaccgtggtgattgctcatgatgatgcctatattcaaggcgaaatgttggacatgcaatcctcttttgatcaggcaatttactacacaactggcggcgatgagcgatggcagtcggtgatgaatggacttgacaaaatctgtgctgaagggggtttggatggtgattgggtgcttatccatgatgcagcaagaccatgtttgccttatgctgatttggatcgattgattcataaaatcaaaagcaatcaatgcaatgcagcaatattggcgacagctgtcgtggatacattgaaatttgccaaagataaccatattagccatacggtcagccgagatgatttatggcaagcgttgacgcctcaggcatttaagataggggttttaaagtcggcttttgaatttgtcatcaccaaccgcctgcagattactgatgaggcatcagcgtgtgaagcgatgggggagtctgtcgccattgtgccagcatctcggatgaatattaagctgacttaccctgatgatttgccgcttatggagaagattttaagtggtttgtttgatgaattggtcaaattaagttaagcttatggcggtttggttatttgtttttgttgccttggctgtgcttgccatcttgggcagtattgagcaattttggtttgatgagacatggcttagtattttagcttcagatcaatgtatcttactgataactgcaggtttattgttgtgtttgcttggatggtcactgatacctacatctaaattagccaaaatcaatcgcttgctcaaagcgtgtctacttgttgcaagtattgttttgttatttgtggtgcgtacattggtcgcatatgttacttatgagatacatacgccaaacgctcgctacatggtcagtgctgacgctcatattcatactctgagtgatgggatttatgatgatatcttgggtacttcatttcgccaagtggcgactttacataatattgaacctattattccttctgctcatcacccctcaactttaaagattcataatccctttggggaatttaatcccaacccttcaataatgccaactcaagaggatttagacaaattaaaatcaatggagggtatgacggtacttttgtcagccaatccaaatgccactcaagccgatttgagtagacttgctaaggttcagcctgccatgcgtttgactgccgagattttgattacaccgattgataaaacgccatcggcaagtggttttgataccaatcaatggctacgcactcgccatattcatgctcaagcaaaaattttgtctgttggtgagattgcaccgcttgaggcagaatctttggctcagcggttttattttcgtcttgagcaatttcgtcatcggctcagaacgcatttttatcaagattggcataagcttagtgcatcgcaatcacaggcaaaagcggtttctttgagcttgatgacaggtgatcgtgctttgattgataaacacaccaaagaactgtatcaattggcaggtatttcgcatttgcttgccatttcagggacgcatgtgctatttttagcggtgattttatcagcacttgtaacttttatgacggataaatttgcacaacgcatttatgcacacttgccaagatggcaaattcgtatgatggtcatggtgttggcaagtttggtttatgcattgtttacagggtttgatgtgcctgcggtgcgaactgtttatttattaattgcagcttggctggttcgctacttaatactgcccactggcatgatttctgtgctggcgtgggtagccttgttgatgatttggcttgacccttatgtgttatggcaagcaggattttggttgtcatttattgccgtgttgttattgatgcattatgagtcacccaaaattgatatgatcaatgataccaatcaaaatcaggggcaacttgtacggcgatggcttcaattcaaacaggcagtgcgtttgcaattttggctattttttagcatgctgcctgtgtctatcttattatttggcaaggtgtcaatctggggtttggtggtaaatttatttgccatcggattgtttggttttgttgttgtacccattaacttaatcgctggtgcagtttttgggattttgccagagctgtcgcagctactttggggcacatcttctgctgtactttattggctgcatgattttttatattttggactaagtagccaaattggtagtttgggtgcttggctatatgcaccttttgggatggcaggatttttactcagttttatggtagtgggcttatggatattgccaaatgtcttacctagggtactgattatactacctttggtggcgatgatatttttgggattgcccaagcaaataccgcattttaagctgattattttgccaagtgatacgcctaatatcagtcagatgttgcttagttatcacaatgccaatcaacaaaaacactggcttatcttaaatgatttgggtgccaagagcttaagagcaaatcatacccaaacgctgacagatcagctgtatcgactgggagcggcacaatatggcatagatggtatcattgtccaaagcccaagtgccatatttttgcctgtggtgggtcagcttgctaaagcattgcctgtgcatcgcttttggcaggcgggtcatcatgagcctttagcaaatattcatcacacaccatgtcgtgcaggtttacattggcaatctgaaggcattggtataaaagctttgacgggttggcatgagattggtgatgagcgtgtacagcactgcgaaattgaagttttggcagatttgccactaaatacccaaaatctgacagaagatcagcttgagcctaattttggggaggttgataccgccacttcaaatcaaacacagcttatcatcagtacaaatcgtgagccaatgctttggcagctatgggatatgctgtgtctttctgacgaagaattaaagttggtgacacctgtaggctaccattcggtttggcttagcaccacacacgccgctgatgccagccatgttaaagccaatttagataccctgcaatcaatttacttagataaatagtgaataatcaggtaggcacactatcgtttatatggtttttgagttacaataagtgtattttcatattttaagtatttttgtataaggtatcaattatggcatggccaccaaatcctgacaaatcgccccaaaaaatatcagctgacacacccatgagtgcacccagacaaggcgaagaatggcgtctgctcgaaaaaacactgcttgccagcattgaagagcaaagggctaaccgtctttggtcggtatttttgaaattactgacctttgcttttttggtattttttatcattgtacttggttttgggtgcagcggttttggatcatcatttgagcgtatcggtattaatgaaccacacattgccattattgatgttaatggggcgatcatgacaaatggtgatgtcaatgcacaaaatatcaatgattctttgatggaggcatttgagaataaccaagccaaagccgtggttttaaatatcaattcaccaggtggttcgccagtgcagtcagatgagatttggcaaatggcgatgatgcttcgtcaagaatatcctgataaaaaattgtatgccatcattggtgatcttggtgcatcaggtgcatattatattgcatcggctgctgatgaaatttgggtcaacccttcaagtttggttggttctatcggtgtaattatgtctgggtacaatctagaagagctgatgaaaaaagtgggcgtaaaagatcgcacgataacagcaggtgaatataaagatattttaagtagtagccgtgagatgaccgaaacagaacggcagcacatacaagccttattaaataagactcaccaaaattttattaaggcggttaaacaaggtcgtggtagtaaactgaaaaatcctgaacaaaatcagctttttagtggtctgatttggacaggtaccgatgctgttgagctgggtttggcggataaaacaggtggtattagccagcttaaaaagacgcttgatttacaaacagtcgattatacttatgtcaacccaatgaataagttatttgatcgttttggtgtgcaggttggtaagggtttgggcgagggtttaaaattgagcctaaaccaagaagaggccaccattcaataatcaatcaaatcaagaaaaaccactcactgattatcagtgggtagttttttgctgttagttggcgtctttatacattcaatactgatgacgcattcatatttaattcatccatatttgttaatccaaatcgcatgtttgattcacatctgttaaggcttcatcgatgatggattggctaaccccttttttacgcaatttttcaatgaatagcatgtcattggcaagcgtataattacaattatcacggtccaaaccttggcgaatgtacaagcgaatcagtccttgaatacggctaaacccatgtactttggcggtatcttcaagatgctggataatctcttcagataggcgtaaaaaaacaggacgcatgatggtttgagggtggtctgaataacgatttt

SEQ ID NO: 37 - DNA, 99629 bp, Moraxella catarrhalis
  unsure 78467: a or g or c or t, unknown, or other
cattgaaaattttacccatctgttgattatttggcagtttcatcataatcgaccccaagctaactttcgtccacaagtgaggccaccaagatttggcggtaatgctaaaatgggcgtcttgcaaacccgcagcatgtatcgaccttcacctttggggttgtcggtagtccgtctagagcgtcttgaggtgattaatcataaagttaggctgtatatcattggcgcagatatggcggatggtacgccaatttttgatatcaagccttatttggctttttctgatagtatcaccgatgccatcagtcagcagatagacacgccatccatgcgtaaaactgccatagataccaaggctaaacaggtgtttgatgggcttattaggcaaggtgtgttagaggatgctgatgttcagattatccaaggtcttatcgctcaagacccaaggcctgcttaccgtcaagatgaggtgggcaccatttttgctttgcgttatgatggcgtggatgtggattttttgatgaatgagacaggcgtgcttatgattgttggggttcgcttgattgggtcttaaaatgcattcatcaccctaaataattgcacaattcaaaaaaaccgctaaaacccaatcagatttagcggttatttgttaaatttggtaataccaaagataatgatggtgcccgaggccggactcgaaccggcacacttgttagaacgagggattttaaatcccttgtgtctaccaatttcaccactcgggcaaagcattttgcaaaagtatgctttaggtctttgctgaattactttggaggctggagtcggaatcgaaccggcgtacacggagttgcagtccgctgcatgaccactctgccatccagccattcaagtgatgctatcttaccaaaaatttttaaaattacaagcaaaatttttaaaaattttcaaaaatgtgccaagtctatgtcattgctcataaaaaagtatcaattgcaagacacaaatttgacaacttacccaaaatatctcaaaaaaatctcactgttttggcgttaaaatcagctataataagaaatttggttattttatatttgtccttaaatgttaggaaaatcctagccaagatagggtggtttttaagggtttgcttgattttgtgtctaagagaattttgcggttatggcagttatggttatcaataccaagttagcagatccataaaattattcattcagttttaaagtttaaagtgggttatcatgaaattaaatctaacagcagtgctggtcattgggctgatgaccagtatgggcgtgctgacggcgtgcagtcaacaggacgataccagcgtgcagcaacaaatgccaaatccgacggtagatgttcaaaccattatgctcgaaactgtgccagtgattcaaagttttgcagggcgtgttgccgccattgagacttcagaggttcgcccgcaggtgacgggcattattgatgaagtactgttctatgaaggtagtatggtgcaggcaggacagcctttatatcggattaatgtcgatagctataccagccaagtgcaagcaggtgaagcagcggttcaaaacgctgaggcggctgtcggtaatgccgaggccacacgagcatcagctcaagcaaatttagccgctcaagaagccaatttggctcaggcacgggcagatgtcatgcgacttgagggcttattggaggttgaggcgatctctcgtcaagcttttgaccaagcagtaaccgccatgcgaaccgctgaagcgaatgttttggctgccagagcggcagttgcgcaggcagatgctaatattcacagtgcaacagcatccgtgcaaagtgcacgcgccaatctaaacgcaagccagctggatgcaggtcgtaccattgtcaaggcacccatcagtggtgtaacgagcatctcagcggtgacagcaggtgcactggtatccgccaatcagccaacaccattggtgacaattaatcggttggatgaagtgtatgtggacatcagccagtcttcaacccaaatgctaagattgcgtgaacagattgagtctggtcaagtaggtcaaggcggtgcagatgttcaactggtgcttgaagatggtcaaacttatccaatcttaggacaattattgcttgccaatgcacaagtggatacagccacgggcaacatgaccttacgcgctgtgttcccaaatcctgatggtaagcttataccgggtatgtttgttaatgctcgcttaattcaaagtgtggtgcatgaagcagctttattgccacaatcagcgatcatgcgtacaccaaaaggcgaaacccaagtttatatcgttaacgcagataacaaaatcgagattcgcacggtaacgacagcaggtacttatcatggtaattggattgtaacaggtggtattaattctggtgatcgtgttgtgattattggcggcagtaaagttaagccagaccaagaggttaatgtgcgagaactgccagctgccagcagtgaagcaaatgctgatatcagcacgccaccgccttctaaaccaagtactgttaactcaaacattccaatggcaagaccacaaagtgatacgacggttgccaacttatccgccgaagaacaagctgcgatgaacgctgctgacgaaaccaagtaaataaaggtatagcatgtctcgtttttttatacatagaccgatttttgcttgggtgattgcaattctcatcatgctggtcggtattttggcaattaataatttgccgattgaacaatacccaaaaattgcaccgcctcaagtaaaggtgcgtgccgtctacccaggtgctgatgctgagacggttgaaaactcggtcacgcagatcatcgagcagcagatgaaagggattgatggactgatgtacatgtcatcaaattcatcagcggcagggtctgcctctgtgactttaacatttgaaaatggcactgatccagatactgcccaagtacaagtacaaaataaattacaatctgccatgagttcattgcctgaaacagtacaacgcacgggtttgaatgttgaaaaatctgccagcgattttttgatggtgacagcttttgtgtctgaagatggcagtatggatcagtcagatattgccgactatgttgcaaccagtattgttgatcctatcagccgtgtggagggcgtcggtggtactaatgtgtttggttcatcttatgccatgcgtatttggcttgatcctgccaaattgcgtgcctacaacttgataccgtcagatgtctcatctgccatcagatcccaaaatgttcaggtttcagcaggacaattaggcactttgccaaccaatactgaccgtgtggtgattaatgcgaccgtcagcgtacaaagctatctgcaaacaccagagcagtttgaagatatcttattaaaaacagatactgcaggcgctcaagtacgcatcaaagatgttgctcgtgtcgagcttggtagtgaaaattaccaatttagagctcagtataacggtcaagcagcatcaggccttgccattatgcttgcaccaggtgctaatgcacttgaggtgcgtgaagcggtgggcgtgcgattagatgagctgtcgcaaaatttcccaacaggactaaaaatggtcgtgccttatgacacaacaccatttgttcgactgtcaattacacaagttgtatatacgctgttagaagcagttgtactggtttttttggtgatgttcttatttttacaaaactggcgagcgacaatcattccaactttggcagtgccagtggtcattttagggacttttgcggtattatcggtgtttgggtatagtattaatatcttaaccatgtttgcgatggtacttgccattggtcttttggtggatgatgcgatcattgttgttgaaaatgttgagcggattttggaagaaaatccatctatccaagtgatggatgccaccattcaatcgatgcgtgagattagtaaggttgttattggtattgcactgattttatcggtggtttttgtaccgatgattttctttggtggatcctcaggcgtgatttatcgtcagtttgcggttactttgatgaccagtatggcactgtctgcatttattgcacttgtgtttacaccagctttgtgtgtgaccattttaaagcgtcaagcacataaagatatcaacattcaaacaggattttttggttggtttaaccgctttttttatcaaaccagtcgtcgttatgaaaactttattggtaaaacttatgcctcaaaattggcgtatttagcagtatatactggcattgtggcggttatggcattgatctttatgcgactgccaagctcatttgtacctgaagaagatcaaggtgcggtcatgactttggtgcaactgccagcaggttcaacacttgataagaccaatgcggtgatggataaactggcaaattattatcatgataaagaaacggataacatcgaatcggtgtttacgatttctggatttggcttcatgggcagcggccaaaattctggtatggcatttatcaaactcaaagactgggatgagcgagcaggcagtgaaaataccgctcaaagtattgcacgccgagcaatggtgatgaatatgatgatcccagaggcaagtctgatttttccaatcgcaccgccgccaatccaaggctttggtaataccagcggctttgatttacaattaaaagatgttggcggtgtaggtcatgaagccctgctggatgcacgcaatcagctgatgggtatggcgatgcaaaatccagcgattgcctcgattcgcccaggtggtcaagaggatgcacccaaactaaaagttgacatcaatcaggcacaagcagccgcttatggcgtacctttgacagcgatcaatgataccattgcacaagcgtggggaggcagctatgtgaatgatttcattgatcgtggacgcatcaaaaaagtctacatccaaggtgagccagacagccgtgtggtgcctgaggacagcaatcgctggtatgtgcgtaatcaatctggtgagatggtgagctttggtgctttttctggcagtcaatgggaatatggcagcccaagtttggcgcgttataatggtgtgtcttcgatggtgttgactggcagtgctgccctaggtgtgagtacaggcgatgccatggaggcgatggcacaaatggcatcacagctgcctgctggcattgattttgagtggacaggtctgtcgcttgagcaacaaaaatcagggggtcaagcaccaatactatatgccttatcaattttggtggttttcttgtgtttggcagcactgtacgaaagttggtctgtgccttttgcggtcattttggtcattcctttgggggtaattggctctttattactcacaaaaatccatgggcttgctaatgatgtatacctacaagttgccctattgactgtgataggtttatcggcaaaaaatgccattttaatcattgaatttgccaaagaaatccaagaatctggtcaaacgctcaaagcgtcaatcatgatggcggcgcgtatgcgtctgcgtccaatcatcatgacctcgcttgcttttggtgtgggtgttgtgccactatatattgccacaggtgcaggttcaggcagtcaaaacgctgttggtacgggggttttgggtggggtgttgacatcgacattcttggggatattttttatcccaatgttttatgtttgggtgcgtacgctatttccctataagccaaaagctcagcctgtaacccatgctaaatctcatgaacatgtttaaggattgattatgaaaatctctacaactgcacgtatcttgacgctctcagcgctggcgattggcatggcagcttgtagtagcattccaaagaaaattgacacatcggcaccgattttggcggtgcctaatgtgcctatgaaggatggctatcaagtctatgatgctgacaccatcagtgtggcgcaggcaccaagcgtggcatcactacgctggcaggaattttatacaaatcctaaacttgcagctttgattgagcttgctttacaaaataacaaagacttgcaatctgcggtcttagccgtgcaatcagcccgtgctcaatatcaaattaccgaagctggcagcgtgccacaagtcggctcaaataccagtgtgacacgccaagcgaataaccgtatcgatgccaatgcttcaaccaattatcatgttgggcttgcgatgagtggttatgagctggatttatggggcaaagttgccagtcaaaaacagcaagcactacatcaatatttggcaaccaacgccgccaaagacgccgttcagatttcaatcatctcaagcgtcgcccaaggttacgttaacttagctcacgctttggctcaaaggcagttggctgagcagacgctaaaaacccgtgaacatgcgatgatgattacccaaaagcgttttgaagcggggattgattctaagtcgccaagtctacaagcagcaagttcacttgagtcagcacgattggcagtatatgcagcagataccagtatcttaaaagccaaaaatgcgttacagctgctgattggtcgtcctgtaccaaacgagctactaccagcgatagatgccagtatgcatatgggtcatattaccacacagacattgtttagtgcaggtttgcccagcgagcttttatattatcgcccagatattatgcaggctgagcatcgcctaaaagcagcaggtgcaaatatcaatgtggcacgcgctgcttattttccgtcgattcgtttatcatctaatgtgggatttagtagtaacagtttgaataacttatttgaatcaagtgctttgggctggtcttttgggcctgcgattagcttgcctatctttgatgcaggcagtcgccgtgccaatcatgagatggcgcaagttgctcagcagtcggcattggtggattatgaaaaagctattcaaaatgcctttaaagaagtgtcggatgttttagctgagcgtgcaactttaggcttgcgtcttgatgcccagattcgccttcaggataattaccgtcaaacttatgatatcgcttatgcaagatttcgttctggattggataattatctgacggtactggacgccgagcggtctttatttattaatcagcaaaatatactacagcttgaacttgccaagttagtcagccaaatccagctataccaagcattgggcggcggtgcaagcttaactgctgagcaaatcacagaatttaatcgtcagcgtgaagccatgcgtccagccatgctgatggatgacgaaaaatcccaataggctgataatcacccaacaacccaatataccaaccaagatattgggttgttgggcatcaattaccaccgtttagattgtgcagattgaatgtgggttgttactgcatttgtgagcgtatcaagtgatttatcagaaagcttggtaagtttgatgtcgaccatcggtgcacttaactcccaatctccacgataacaagataattgccaagccgccaatgattggcagtctggttcgatttggtcaaagctgatactaaatgccttaggcgtttctttatcaccaaagtatagcatgccttttttggctttttgtagcggttgattgtgataactactcagcacaaaaaccaaatgatgtgcctctttgagcaatttatccaatttgatttgaatttgttcttgctgaattagactatcgtcaaagcttttagcacctaccaaggcatcgccatgatggcgaatagattcattggcattacgcaaattaccataccaaatcgtctccaagatattaaatgccttatcataaacaaagcaagataaatcaatatccatcgccacaggcgcctcatctactaagggcagtttggcaagtaaggcagatagcccttgtttttcaaggctggtaaagtggtagctcacccccacggtcacagtatgaccaagttgatgctcacgaatcttgattgggtcaaaatattcttttaagatatgagtattggttgacataaggtaattttatccatttaagtgaaaagttcatcataccttatctacatcagagttttaagtgttggcatgcagattggttgataaaaggggcaattttaacaaaaaacctaaacagaccgtacaaatacaagcaaaaattctcaaagtaatcaggctgttatgggtgggttgattatcgggccaattaatcaaaaatcttcccagggttgatgatgccattggggtcaaataccgctttgatggctttcatataatcaatctcagtctgggtgcgtgtgtaggttagatatggctttttggtcatgccaacgccatgttcagccgagatagaaccttgatatttttgcacggtatcaaacacataagtattgaccgtttggcatttttcaaaaaattcatctttggtcaaattggcaggttttagaatatttaaatgtaaattgccatcgccaatatggccaaaccaacagatttcaaagtcgggataattggctgtgacgacgtgttcaatatcgctgataaagtctgccaaatggctgattaatactgaaatatcgtttttataaggggtgaatgccgagatggtctcagagatgctttcacgcaatttccaaagttcttgaagttgcccaatactttggctcatcacaccatcaacaattagcccctcttcggcacattgctcaaacacgcccatcgccaaatccagcacatcatcattgatggcctcaaattctagtagtacataaaagggtgcttggctctcaaagggtgctttggtatgacctgcggcgatgactttatcaacagccagttggtcaaaaaattcaaatgctgttaaagtcaatgcttgaccaaattgagccagtaaagtcaccacaccgttaaactctgtcacgccaagcaccatggcggttagattgattggctgtttttcaagtttgattaacgccttggtaataaaaccaagtgttccttctgcaccgatgaataaatggcgaaaatcatagcctgtggcattttttagcataccgccatttaaagttaaaatatcccctttgcctgtaacaacggtgagacctaagatttgatctcgtgtcataccataacggataaccttaataccaccagcattggtgctgatattgccaccaatttggctagaacctgatgaagcaaaatcgacggcataatacaaaccttgatttttggcaaattcttgtaatgattgagtgatgacaccagcgtcaacctcaaccatacggtccgcttcataaaactgaccaatttggttcattttatcaaaacttatcaccacctcgccttttgtcgccaccgctgcagcggatagaccagtgcgaccaccacttggcactaagggggtttgatgctcattggccaatttgacaatcacagacacttcttcagttgtttttggaaaaatgactgcttggcaatgagtatcaaaatgcactgtccaatcacgcccccaatgctgggtagattcggtatcagttttgatgcttaaagtgggcagagtatttgataatgcttgtaaaaatgcgtgatgtggattcatgctcttctcaaaattttgggtaaaaaactaatctaaactaccatcagtgtataaaaggtaaatcatacaaaatataactgtatcatagcagattatcaagtgattttaaaacattcttaaaaaacggttctataaaccaccttagaaaataatcttaataataaaattaaattaaatataattttggtgatgatacaaccctaaaagtagaaaaatttgctataatacaaataattttgaccataaaaaagagcattcattatgacctccccaatcgcccaaaaatctgaactgctttgtcctgctggcacatttaagaacatgcaatatgcttttgcttatggggcagatgcggtgtatgcagggcaagcccgttactctttgcgggtgcgtaacaacgactttgatgaagaaaatttggcaaaaggcattgcctacgcccattcgcttggcaaaaagttttatgtggtggtgaacattcaagcacacaacgccaaattaaaaacctttattgaagacattcgccctgtcattgaaatgaaacctgacgcgcttatcatgtccgatgctggcatgattatgatggtgcgagaagctttccccaatcaagtcattcacctgtcagtacaagccaatgccgtgaactgggcaacggtgaagttttggcagcagatgggcattagccgtgtgattttaagccgtgaattatcactcaaagaaattgagcaaatcatcaaagaagtgcctgacatggaggttgaagtttttgtgcatggggcgctgtgcatggcatattctgggcggtgcttgctctctggctatatcaacaaacgagacgccaaccaaggcacttgcaccaatgcctgtcgctggaattacaacacttataaagcggtggagaatgaaacaggcgatatcgtccctgccaacccagaagtgttcgtccccagtcaaggcgagattagcaatgtcaacctaaatggcgatgtcgtcatggacgatgattatgtagaaaaaccgtccgatgaggttgtactcattgaagaacaaggtcgcaagggtgagctgatggcgatgtatgaagacgaacatggcacttatatcatgaattcaaaagacttgcgtgcggtggagctggtgcctgatttggtcaatatgggcgtgcattctttaaaaattgaggggcgtaccaaatcgcattattatgtcgctcgcaccgctcaggtctatcgccgtgccattgatgatgctttggcaggcaagccatttgatacaggactcatcactgcgcttgatgggcttgccaatcgtggttataccgaaggatttttacgccgtcatgtgcattctgattaccaaaattatgaatacggctcatctaagaccgacaatcagcagtttgtcgctgaagtggcggacatcagcgatgagcgtttgactttgactgtcaaaaacaagctgatggtgggcgataccattgaaatcatgactccgcaggggaatgttagctacacgctaactgagatgtgggataaaaaaggcgaggcgattgatggtgcgttaggctctggttgggtgtgtcaaattgccaatccctttaaggatatggataaagacgtgctaaaatttgccctagtgatgaaaagcgtgagtgaggcgatttatagctaagcggtgattgttatatgcagttaaaatttatggatttttgttctggcataggtgcagggcgtctgggtctagaaaatgcaggcatgtgctgtgttgctcatagtgaaattgatttgaattctgacctaacctatcaattattttttaatgattactcaaatttgggggatttaacccaactaaattcagatgacttacctgattttgatgtgatgcttgctgggtttccttgtcaaactttttccattgttggaaaaagagcagggcttgatgataaccgtgggcaaattatttattatctgacagatattttaaagcaaaaaaaagtctctttttttatcttagagaatgtcaaagggttaattaatcacaataaaggtaaaacactgaactttatcttatcattattgtcagaagctggctatgatgtgtatcatcaagtattagacagccaatattatggcgtaccacaaatgcgccaacgggtttattttgtcggcatcagaaaagatattaagcacatgccttttaaatttccacaaccaattttatcaaaaccgattgatgactttttaagtgatgatagggattatgaatttgatgtcaataatcccacttttcaaaaatacctagccagcaaatataacaaaaatcaatacaatattgaagaaattttaaaaaatgaccataacatcattgattggcgacaatcagatttgcgcctttatgataaaaaagttccaacactaagaacaggtaggcatggtattttatataccaaaaatggtacacttcgtaaattaagtggttatgaaagtttattattgcaaggattttcaaagcagcttgccaaaaaagtcatagaacacaaattacctgatggtaaaatactctcgcaggcaggcaatgccatgactgttacagtcattgaacagattggcaaacaattattaaaatctattggtgagcaagatgaacaacaagcaaaacttgattgatttgggttcacaaactgccaaaaatggtttcaaaaatgaagaaggcatttgtgctaaatttaatcactggcaatctgatgagattgctcagaagtggcttgttattatgggctatgatttatcacaaattaagagcgtaaaagcagttattttatctggatataaggcagatattaatttacaagtttttgtattctataaagaagtggtagatattaaaaatattcaagtcaaattggttagtaataaaaaaggttttaaccaaattgataaacgatgggtaaaatcctatcaagaactttggcattttgatgacaacattggtcaactattaagatattttacaggtgaattaaaaaaaggcagtaaaaaacgacttttaatgaatgaatttactgacaatgaacaaatcatgttattaaattggtttaaaaataataaaatcttagtactgagcgatatattgcgtgggcgaggtgagtttagtgctgaatggatgttggttgctcaaaaattatctcaaaattctcgttgggctttaaaaaatattaatgaagttttgcaacactatggcgatggtgatgtggtgatttcacctaggggttcattaaaaattggaagggtaaccatgcaaagaaaaggtggggataatggacgaccaactgccaatatgcttcagtttaagattgacccagcagaattatttgagctttaaagttatggcactaaaaatcaccaccgactgtatcaactgcgacatctgtgaaccagagtgtcccaatgatgccatcagttatgaccaaaaagggcaaaagacttatgtcatcaaccctgatttatgcaccgaatgcctaggcttttatgatgaaccgacctgtgataaggtctgccccattgactgtatcatcaaagatgatagccgacctgaaacccctgatgagttaatggcaaaatataagcggatttggggaaaatcataaaaataaatcttttaaagtaaaccaactttaaagtaaaccgattaaaaagcgtacccattagtacgcttttaatgttttggtggttgtttattgctatgccgtcagtgcttttttgaccaatcctgaaatgatggcagggtcagcttgaccgacggtcttttctttaactgcattcatcacgcgtcccatatctttcatgctattggcttcaagctcagtaatagtcgcagcgatgatatcattcagtgccgcttcatcaagttgagcaggtagaaactgcccaatgacctcaatttcaaatttttctttggccgccaaatcatctcgaccattcgcttgataaatatccaatgattcttgacgctgtttgatttgcttttgtaacagctcaagcacagcattatcatctaaagttgtctgagtatcaatctctacttttttgatggcggcttgtacattacgcaggatttttaccacttccatctctcgagctttcatagaagatttgatggtttgggttaatgagtcttttaaagtcatgacagttttcctttaatggggttgattaaatatggttttgtagggctaacagccgatcatatacggtcgttttttttaatccaagtacatctgcaacaatgctggcagcttttttgggtgggagttctttggtgatagcaagaagccacgcatcataatccgtgctttggtgtactgtgtcatcacatcctgcaaccaccacgacaatttcacctttttgttgattgctgtcattttggacaaattggacaagctcacctaagggtagttttttgatggtttcaaaggttttggtcagctcacgacataaagttgcttcacgagttgccccaaaaacagtcatcatgtcagttaaggagtcaacgatgcggtgtggtgcttcataaaatattaaagtttgtgtgcaggcttgccagtgttgcaaggctttaagtcgtccatgcgacttggcgggcaaaaatccagcaaaagtaaatcggtctgagggcagtcctgccaccgaaagggcggctatcgctgcacatgcacccacaataggcactgtattgataccgtgttcgtgagatgccttgaccaatcgatatccagggtcagagaccaagggtgtccctgcgtcgctaatgagtgcaacagactgaccagagtttaatttttcaattaggtgtacggtttgcttatcggcattatgttcatgataagcaatcgttggcgtggtgatattaaaatgctttagcaatttggatgaagtacgagtatcctcacaagcgatgagattgacggattttagtgtgctgatggcgtgttctgtcatgtctgataagttgccaattggcgtgctaacaatgtataaagtaccattcatgattattcattctcaccaaaaatatctgtattgctgggtgatagatgatgcttgtcagaaggtgttaggtgtagccaatcaccaagcaccaaagcaagctcatccataccctcttttttaagtgcagaaaacaactgaatactaaaaggtaagtccagcgcttctagctgtttttttgttgctaacaaggcggatttttgtgcgcctcgcttaagcttatcagattttgtgagtaaaacatgaacaggtaatttgccatcttttgcccagtgtaacatttgttcatcaaaatatttaagtggatggcggatatcagtcatcaaaaccagacctgccaaggattggcgagataccagatagtcttcaagttctttttgccatttgattttcatgctttcaggtacagcggcataaccataaccaggcaaatccacgatgcgtgcttgttcatcacccaccataaaaaagttaatcatttgggttcgtcctggtgtttttgacgaacgagcaagttgtttttggtgtgtgatggtattgatggcagaggatttaccagcattggagcggccagcaaatgccacctcaaagcctgtatcttcagggcatagtttaaaggtgggagcggacaataaaaacttagtttggtgaatttgttttaatatctcttggctgttcatatcagttaatcgttaaacataatatttaagtgtaccatgaaagattaaaaatagcgatatgagcctagggcgatgcgtgttaaatttcaggcaaaccatctatttttttttaatgatgataaaaaatggccatttaaaaaatagccatttaagtgacatattaagcttaaaaatgaatgtaaaaagatgactggtatcttttttacaaggcaaatagacaaccacgctttattctaagctttctaggcgaatacgcacgacaggttcaaccaccgctccgagtgcttcaatttggcggatagcggcattcatttgtttttctaagacaggcagtgttaaaataatcactggtactaagcctgatttatgggcatcacgctgtaaaatggcatcgatattaataccattatcacttaaaatgcgagttgtgtctgccaaaacaccaacttcatctttgaccgttaaacgcaaataataacctgatgtcatctcatcggcaggtaaaataccaatatcagacagctcttcgggaataaatgccaaatgtggtacatcgcttggtgtggcggcattgatgacataaatcaaatccatcacatcagccataactgctgatgcggttgcacctgcacctgcaccatcaccataatacagtgattgacctaaggggtgagcatcaatcataacggcatttttgacgccattaacattggcaagcagtgcttgcgaaggaataagtgtaggatgaacacgaagttcaatgccatgatcacggcggatagcaaagcctaaatgcttgatcgtatagccaagctctttggcatagatgacatcttgtaagccgatcttggtaatgccttcgcaataaactttatcaaactgtacaggaatgccaaaggcgatagatgccaatagggataatttatgtgccgcatcaatcccttcaacatcaaaagttgggtcagcttctgcataaccaagcgcttgagcttcaacaagtacttcgtcaaatttacgatttttttgttgcatctctgtcatgataaagttgccagtaccattgatgataccagtgagccagtcaattttatttgccgccaacgcttctcggacaattttgatgattgggataccacctgcaacagccgcttcatagcgtacttggacgccatgctcttcagccaatctaaaaatctcattaccatgtttggcaagtaaagccttgttggcggttacaacatgttttttgtggcgaatggcatgcgtgatgacttcataggcaatatctgtaccgccaatcacctcaatcacgatatccacatccttcgcctctgcaatggacattaaatcagcagtttgattgatacttgggtcgatatcatggcgatgacggcgagtccctgcgtgtgttatcacaagctgatgaccgctacggcgagcaagctcattgacattatctttaataaggtttaatacgccagtaccgacagtacccaaacccagtacggcaagattgatggtattattcacaaaatactccgctatcggaatgttaattttgatacatttggcgataaaaagaccaccaaactctgaaaaaagcgtttataatcagtgctgatatgttcaatattaaaattattcaaattaaaaaataccttttaacacctttgataaatctataaattgcctaagttatcataagttcgtgttttgtgctaggtttttttggtgatttaatttttacccttaggtattagggtgtacttacctgtggtattgacaacaaaaataaaatttagtcgtttttcatcataaataatattaaattttatttttatcaaaacttaataaaatattatcaagggtaggcacgccccagcttttttgatcaatcaggacagttatcgttgttcaatggcagtatggatgagatctttggcaggcatatagccaccaatctgcctgccagattcggcaaaaacagcaggcgtgcctgatacgcccaaactacgccctaatgccaaatgttcttgaacagggtttttacaatgcttggcatggacagtttgaccaagcttagctgctgttaaggctgcttttcggtcttggctgcaccaaattgcttcggtgagcggtatgtcttgttctgagcgtggccacgccaaataacgcacctcaataccgccagcattgagctgcttgatatccttgtgtagcattcggcagtagtggcaagttgggtcgctaaaaacataaatagatgctttatgctgactggttgcagggtaaataatcatatcatcagtattggctttggctaaggtttctttggccaaagatgactgaatgtcagcggtaatatctgtcggataatcaccacttaatttgacaatttgcccttgaattaaatattcacccgatttatctgtgaacattgcaggggcattttcaaagctgacccaatagatatcaggcatggttgttggcagggcatttgtcacagtgatatcaacccctgcttgggtcaaattatcttggagcgtcttgacaagcgtggtatcgctttgagaagaagtttgggttgttggctggctggcattagaggtatctttggcatgagaattgccagagctgcaggcgcttaataataaaaagcttgccatcagtgttggcggtaataatcggtgcataaaaatttgacgcatggttttaacagcctaaaagtgataaaaatggtggtttgagagtgtggtatcaatgatttatcagtcattgagcgacttgcctttgatgattaaaatggctgttgcatgaagttatgaagtattgacatcttaatcatcatatcccaaaagtcattggcttaactaaaatagataatctcaaaaaattataccaaaaaatggccattgctaccaagatatttcaagatatttgtttaaatgacagcgttaatttttactgtggtttgttttggttttatcgcattggattattattcatattacatttataataaattgataataacttaacttattttattttaaataatcgcatcatctgacttgcaaattgtcataattatttgatacaatacggcgttatttcaaacctgcctttggtgttttatcactcgatttaaagcccaattaggcgctcatacaggaaataacctatgctacgcattgcctatgatgctttgacatttgatgatgtcttgcttttgcccgcctattctgaagttctcccaaaacaaacttccctaaccactcgcttaaccaaagatattaccatcaatttgcccattatttctgctgccatggataccgtcaccgaatcaaaaatggcaattgcgatggctcagctaggtggcatgggtatcattcataaaaatatggatatcgctcaccaagcacgccgtgtccgccatgtgaaaaagtttgaagcaggtacggtggcagatccgattactgttaccgccgatgcaacggttggcgatttgcttgccttgacgcgtgagcataaaatcagtggcgtaccagtcgttgaagcaggcactaataaggttgtgggtattgtcactcatcgtgatttgcgttttgagaccaatttatctcagccagtcgccaatgtgatgaccccaaaagataagcttgtgactgttaaagaaggtgaaacccaagagcgtatcaaagagctgttacatcgccaccgtattgaaaaagttgtggtgattgatgatgattatcagcttaaggggttgattaccgttaatgatttttctaaagcagaaaataacccgaatgccgccaaagacagtaaaggtcacctgctggttggtgcggcagttggtactggtgccgatacccaagcgcgtgttgaagcattgatcgatgcacaagccgatgtgattatcgtagataccgcacatggtcattccaagggtgtgatcgatcgtgtggcgtggattaagaaaaactaccctaatatccaagtcattgggggtaatatcgcaacaggcgatgctgctttggcactgttagatgtaggggcagatgctgttaaagtgggtattggtcctggttctatttgtacaacccgtattgttgcaggcattggcgtcccgcagataagtgccattgatagtgtggcaagtgcgttaaaagatcgcattcctttgattgccgatggcggtattcgtttttcgggtgatatcgccaaagccatcgcagcaggcgcttcatgtattatggtgggtagcttgttggcaggtaccgaagaagcacctggtgaggtggaattattccaaggtcgttattataaggcttatcgtggtatgggcagcttgggggcaatgtctggtcaaaatggctcatcggatcgttattttcaagatgccaaagatggtgttgaaaaactggttccagagggtatcgaaggccgtgttccttataaaggccctgtggcaggcatcatcggtcaattggcaggtggtctaagatcatccatgggttatacaggttgccagaccatcgaacagatgcgtaagaataccagctttgtcaaagtgacttccgcaggcatgaaggaatcgcatgtacacgatgtacagattaccaaagaagcacccaattatcgccaaaattaactctattaatagcaaatacaagcactcattagatagggtgggtgctttttagagcataaaaaataaactgacacatgacttattgtcatatttttaaaatgcttttaatttagatttttaatttagataatggctaaaaataacagaatattaatttaaagttttcaaaatcaagcgattagatgaaattatgaaaataaataacaataattctgatttattttaaccaataatatcaattatcatttacaagaaaaattttttttgataaaattcttacttgtaccttgctattttttcttatttatcatttttggcggtattttcgttgattttagtaagtagatgagcaagggataatttgacaaaaacaaatttgatttcaagcctcataatcggagttattatgaataagtttcaattattaccgctgacattggcggtgagtgccgcttttacaaccactgcttttgcagctgttagccagcctaaggttgtcttggcaggtgatacagtggtcagtgatcgccaaggtgcaaaaattaaaaccaatgttgttaccttacgagaaaaagacgaaagcacggctacagatttgcgtggtttgttacaagatgaacctgccatcggttttggcggtggtaatggtacttctcaatttatcagcattcgtggcatgggtcataatgccattgacctaaaaattgacaacgcttatcaagatggtcaattacactaccaccaaggtcgctttatgctagacccccagatggtcaaagtcgtttcggtacaaaaaggggcaggctttgccagtgcaggcattggggcaaccaatggtgcgattgttaccaaaaccttagatgctgatgagcttttaagaaacagcgacaaagattatggctttaaagttggtgcaggcttatcaaccaacaaaggtcattcttatcatggtagtgcctttggtaaagcacagacaggatttggtcaggtagatgcccttgtctcttataatcaagtaaatgacagcgactataaaggcggtaaagggtacaccaatctgttgggcaatgatgtggttacaagaagtgccttggataaatccagttaccttgtcaaggcagggctaactgctggcgatcatcgatttgtggtcagccatctaaatgaagttcataaaggcattcgtggcgtgcgtgaagagtttgacttcgccaatcgtgccttgacgctagatatagaaaaagataagaaaaaacgtactgacgaacagcttcaggcagagttagataacaaatatgcaggcaagggttacaaacttggcagtaaaacaccagatggtaaaaagtataatgtggttgatgccaatggtaaattggtggctgatttagataggaacaacccaactcagcgtgaaacctaccaaaagttaaccaaccttgaatggacaggtaaaaaccttggttttgcaaatgaagttactgccaatgtctataagttagaacatggacgcaactcctctagcgataaaggtaacagctatattcttcgtgatgtacctaataccatcaatgataacggtgatagcccatcaaatatgcatgttagtgccaaaggggctaatattaattttgataaagaatttaatcacggtctattaaaaggctttggcgttgaccatactttattaaaatatggcatcaactatcgccatcaagaagctgtaccgcctagaggtattagacctggttttcaacaccaagaaaaaaccgatgctggtatttatctagaagcggttaaccaaatcaatgactttaccatcaatacaggcgtgcgtgttgaccgttttgactttaaagctatggacggtaaaaaggttggaaaaaccgacatcaacccaagctttggggtgatttatgatgtcaatcctaatcttagcgtcagcggtaacctaatctatgccactcgcagcccacgctttgctgatgctatcctaagccgtggcttccgtgatggcgttgtgagtattgctgataacgcaaaagcagaaaaagcacgcaataccgagattggttttaactataataatgggccatataccgcctttggcagctatttttggcagcgtgtggataatgccagagctactgccgatgctgtacaacaccccacagttacaacagctaagattacctatcttggcaaccaaggtcatcagaccaaccacggttatgagctgggcgtaggctataccgaaggtgcgtggcgtgcgcgtgctggcgttgctcacagcaagccaaccatgcacaatgtcaaatttaaagccaaccctgaatatgccgtgcgtacaggtcgtacatggacagcagatgtcgcctatcgcctgccaaaccccagtgtagagcttggtgtgagacacacattggttgaaggggtagatgccaaagacacttctatccttagcggtaaatttgatgataaagatggtgctattcttaaccgtgaaggctataatgtcagtgacatctatgccaactggaagccttatggcaatgataaggtgaatgtaaactttgcggtgaataatgtctttaataaaaactatcgcccacacactcagcgtgcttccatagataccttacctggggcaggtcgtgatttccgtgttggcgtgaacttcacttactaatacttgccgatttatcggtataatactgaacactcaagcacgcttgggtgttctttttatgggtatgagtggataaaaacgataaaaaaagccaatcgtatcatattgattggctataatgataaaattaaatcattactgatttaaaaaccacgcattggcactgcgtttggcagattcgatttcactggaggataaattcagagcaagctggctgactttaaccttagcacgattgcgtacattatcatcaagcataccctcacgagcggataaatcataccatttataagcatcaaccaagcgttgttgctgctcatcaatcattgccaaagcatagctggcacgattatcccccaaattggctgctttctcaagccaagctcggcctgtggctatatcggctctaacaccttctccacgcaaatacatgatgccaagattgagctgagctggagcaatatttttttcggcggcacgggtataccaataaacagcttttgaggcgtctttggtaacaccttctcctttttgcaagcgtttggcaagaaaaaactgggcatgataatcaccacgagcggcttgattggtcaaggttgtgatatcgattgtttcaaagcgagtgttagcaatggcggatagagaatgactgaaagtggcactgcccaatatgctggcaaataaggtgattttaagcagtttcatggcgatgtcctttggtgtgtgaaagctttgtaaagtctcccaaagtcatatgatgctgactgtcggaagtatttacagataaaaccaaataatacatccataccgttcatatatgatattcaatgatatttatacggtctatggcatggcatattatgaatgaattcaaccacttagtataatgtatttatatcatcatatcagtaaacaaagggtaacagaaagttgcataatatcatcaattcatatcgctagatgaatgtgcttgctcaacagtcagcgataccttagtacttggcaatatgataaacggcaacatctgccagcagatttggaatacgcttgaccatatgatttaatagcactggaggtaattttggatttggcttatcgctaatggcaactgtgtctagaatgcgaatgttatttttatcgcacaattgttcaaaatccttaaaagtacatagatgaatattgggggtattataccattcatggggtagagtgtctgatatcggcatcatacctttgatgcccaaatacatacggttttgccaataggcaaaatttggaaaagtgacaatgccttctttggcgactctgagcatatcaatcaatagctggtctggggccttgactgcctgtaatgcacgagccatgacgaccgtatcaaagctattatcagcaaagcgtgctaagccatcattgagattttgttcaatgatatttaaacctttggcaatggcttgattgattttatattcatcaatttcaagcccataacctgtgacgcctaaatgcttttgaagatgttcaagcagcgttccatcaccgcatcctaaatccagtacacggctattaggttctatccattgctcaacaagttggtggtcaatacgcataaaatacctatatggatttgatgaaaatttttgctaacatattaaaattatgctttatttggcctgtaaaaaacctttgagagcatcacgataacgaggaatatcaaataaaaaagaatcatgaccatgcggggcatcgacatttacaaagctaactggcttggtattagccattaaagcatcgaccaactcaactgagcgttcggggctaaatcgccagtctgtggtaaaagatattaccaaaaattggcagcgtgtgcgagacaaagtcagctttagggcatcttcatcagacagaccatcaggtgcatagtcacgagtcggatcaaaataatctaatgctttggtcattaaaagataagtattggcatcaaagttttggctgaagcgttcaccttgatagcgtaaatagctttctacctgaaactcaacatcatagccatacataaaccgaccagattttaaatctcgtccaaatttggctttcatggcatcttcggtaatataagtgatatgcccaaccatacgagctaatattaaaccacgccgtggataagtgccatgctctaaataccagccatcatgaaactcaggatctgataagattgactggcgagcaacttcattaaaggcaatattttgggcggataatttgggcgtactggcgataatcacacagcgagataatctatcaggataatcaaccgaccattgcagtgcctgcatgccgcccattgagccacccacaattgcatgccattttttgatttctaggcgatcagagagcatgacttgggttttaacccagtctttgatagtaatcaagggaaaatctgcaccatagattttacctgttttgggattgatggtggtagggcctgttgaaccgtggcaagagccaatattatttaaacaaactacaaaaaatttgctggtatcaatcgctttaccattaccaataagattatcccaccagccagccttggtatcatcagcagaatgataacctgcagcatgatggctgcctgataaggcatggcaaattaagatggcattagatttatctgtattgagcgtaccataagtttcaatgacaagctcaaaagcaggcaaaatctgctggcattctaatgttaaaggctcatcaaaaataagtgtctgtggctggacaatgccaacggaacttggatcaagatacggtgctgtttgttcataatcagacacaacggtttcctaatttattcaatgtatttatgtacttaatcttgattaactgaagttaattgactgaatttagctaagcattgattttataatgataacttaactaaataccatcgcctaactagaccttaattgaaaaccaacctgattgggcggggtaaccttaaagatttgcactttaaataacacatcttgacctgctaaagggtgattaaaatcaaccaaaacctcatcatcggttaccaagcttatgacaccaaccagtgaattttgacctttatcggcaaattccatcatcataccaaccacaggattgggttcagatagggcaaattgtgtccgagtaaaagtttggacattttcaggattccattgtccaaaggcatcatcggctgacaaggtggcggtgcgtgtatcaccagcttttaggttgattaagactttttcaaatcctgccaataaactttcatcgccgatggtgagtgtgacaggttcttggcgatgaaaagttgagtcaatcacctcgccgttcatcaaactgacctcaaaatgtaaactgacggtgcttttatgggtgatgcgaacttcttcactgggtaaaatgggtgtattcatgagatggtattcaattggtgaattggattttgggatggatggcagtttttcgtagttattttagcacagttaatcagcaaaggtacttaaaacttgaaaaatttaaaacttgaaaaattgcgatttgattggtgctgggtctttcaagtcttatggcaaaatggtcaaaaatctgctcattttgattgaatgttttgaccattttgatgagcggtggctgatgggtggtttaaacagatcgccgttttttttctaaaaatagcatgtcataaataatcattgccatcccaacacaaataccaatatctgcaatattgaaaatcggataatgccacacatcagcataatgcacatggatgaaatccaccacatgattatgtaaaatacggtcaatgacattaccaatagcaccacctaataccaaggataagcctaagtttaggatgttggcggtttttggtgctttttttagataaatgatgataaagcctgagacgatcaaacctaaaatagcaaaaaaccatttttgccagccattttgatctgccaaaaaactaaacgctgcaccataattatgcgccaaagtccagtttaggatgggtgaaatgacctcaacactctcaccaagctgaaaggtgtttttaaaataaaatttggtcatctggtcactgactaagaccacaatagcaatgagataatagcccatgacctgcttggtatttaaaagcaaatgattaggcatacaaacgcatctccccatcatctaaattctgcacacaacgaccacaaatctcaggatgctcggcgtgtgtaccaacatcagtacgaacatgccagcagcggacgcattttgtgccatcagcaggcgtgatggttgtagacagcgtatcaccagatctcacggttgcatcagaggtgatgaatacaaagcgtagttcatcaccaaacttatttaagatatcagtgatatcttgtggagcggtaatggtaactttggcggtcagattactgctgacaattttatcactgcgtgcttgctcgatggacttattcaccgtatctttgattaaggcaactttatcccaatcttcgtgactgatatcattcatctgaaagtctggtaactggtaccattcagcggtaaaaatatagccttgtgtatcttttaaaacctgccaagcttcttgggcagtaaatgataaaacaggagcaatccaacgcaataaagcatgggcaatgtgatataaagttgtttgagctgaacgccgtggcagaccatctgccttggtggtataagtgcggtctttgataatatcaagataaaacccgcccaagtcttgggaacaaaatcccataaccgtttggcaaacttgatgaaaatccatgctatgataagcttggataatctcttgttggatatgtttggtgcgatataagatatatttatccaaactgatgagtttatctgttgataccatatcggttttggggtcaaagtcatccgtattagcaagtaaaaagcgaatggtattacgaatgcggcgatacatatcggttgtacggtcaaagccttctttagatacagccatctcgtagcgataatctgacgaacctacccacagacgcaaaatatccacacccattttattggcaatatctgatggttcaaaacctttggtattgcctttggatttggataatttatggcctttggcatcaacagtaaagccatgcgttaaaacttgtttataaggtgggcgaccataaatagattcactgaccagtaacgatgactgaaaccagccacgatgctgatctgagccttctaaatataaatcagcagggttggatagctctttgcggtgatttaggacagcaaaattggttgcacctgaatcaaaccacacatccagtgtgtcggttactttgtaatactcaccgctctcatcacccaaaaagtcgctaatgtcagcatcaaaccatgcttcaataccgcctttttcaatgatttgggcggctttttcaataagctcggaggtgcgtgggtgcaattggtctgtttctttgtggataaaaaaggtaatcggcacaccccatgtgcgttggcgtgagatacaccagtcagggcgaccatcaatcatggcttcaatgcggttttgaccccatgctggtgtccatgtgatatttttaatatcgtttagggctttttggcgaagtccgttttgttccatgctgatgaaccactggggcgtggcacgaaaaataatgggggttttgtgtcgccagcagtgtggataactgtggcggatttttttgtggtcaagcaagtgtccgcttgaccccaaagtctcgataatcttaggctgcgctttgtagatgtgttcacccacaaaaaccttggcattgtccaaatacacgcctgcatcactgacggggttttcaacaggtaaattgtatttgttgcccacaatatagtcgtccacaccatgagcaggagcggtatgcaccaaccctgtaccactgtcagcggtaacatgctcgcctgtgatgatgggtacttggcgttcgctgataagggggtgttgggcgtttaagacggtcaaatccgcccctttgatggttgtgattgtctcaacatcatcaagtgccacatttttgctaaaatccgccaccaaatcatttgccacgataaaatgggcggtgtgattgatggtgcttgggtttgtgatggtatagacccacattttaccaaagtcattttctacatctttttgataaactgcccccaatttttctaccgcttttttggagcggtcattgccttcatgtatctgaaaacagacggcatttctgtatttaaaggcgtggtttaataaggtgtgtttaatctcatcatttacccctttgccccaaaattcgggtgtgatgaaggtaaaaccaataccgatggtatcatctttggcattgtcatgacaaaaacgggttgtgccgatgatattgccagttcgcttatcaataatggcataggctttatctttcactgcttgttcaaaaaatggttcaaacacctctggcaggtgtcgtttggttggcataaattgccaaatggcagggtcggatgcacacgcttgtagtgcctgcttatcggctttggttagggttcttagggtaaaatttttactgtcaatttggcttggtagtgcaaagatgggggtttttttgcccttaatgacggcataatcaaaatcgccatgtaccgagattgcttggttggcaggcagtgtccatggggttgttgtccaaatgacggcttgaagcgtgccactgatattggcgatgatgggtaggttttcacgattgacaatatcaaagccaacatagatggcatctgaggttttgtcttggtattcaacctccgcctcagctaaggcagaaccacaatctaagcaccagttgacaggtttcatgccacgcacgatatgaccgttgtcataaatctttcccaatgctcgcacgatattggcttcttgttggtaattcatggtcaaataaggattgtcccaatcgccaagcacacccaagcgtttaaaatctgccatttgtagttgcacctgacttttggcatactctcggcacgcttcacgaaactttgttgcattgaccttttgtccgactttaccaattttttgctctactttttgctcaatgggcagaccatggcagtcccaaccagggacataaggggcgtcataaccatccaaggttttatacttgatgataatatcttttaggactttattaaccacatggcctaagtgaatttgcccattagcataaggggggccgtcatgtagaatataggttttgcggccttggcgagcctgacgaatttgcccataaacatcgtctttttcccattgttccaaccaaagtggctcacgcttagcaaggtctcctcgcatggcaaaagtggtatcggcaagatttagggtgttcttgtagtcaatggactcagtcatggcgtatctcgcttttggctaaatttagtaaactgcctattataagacaaaattaagaaagttacaaagtatttggtgggggcggatggaatattatcaaatacaaaatataaatataattccttatcatctcaaaaagcagcataaatgtgatatttacaatcggcttcatttttaagaggctgaaaaagttttgatactttttatcatgctaagtatagtacaatattaacattatttttgagtgatttggagtgcgtatgagctggtttccaaaatggcaaccttatacaggtgatattaacacacagcctgtggcaacgaatgaatatctgccagttgggcagagtattatgttgggattgcagcatgtcttggcgatgtttggggcaacggtgcttgcacctttactgatgggatttgatgccaatcttgcgattatgatgagcgggatttgtaccattttattttttgtgatgacaggcgggcgtgttccgagttatttgggttcaagttttgcttttattggtgtggtggcaacagcaacagcacatgccacaggcagcggcgctaattcaaatctatcagtggcgttaggtggtatcatcgcttgtggttttttgtatgctgtcattggttttattgtgatggcaacaggcacacaatggattgaaaaactcatgccacccgttgtgacaggtgcggtggtgatgattatcggcttaaacttagccccaattaccgtcagcggtgtgcaaggcaagccgtttgatttatggatggcattgatgactgtgttatgtatgggtatgattgcggtttttgcacatggatttttacagcgtttgttactactgataggtttggtgatggcatatgcaatttatgcgatagcgaccaatattttgggtttaggtgagccgattaattttgctttaattactgatgccgattggtttggattgccaaattttagcagcccaacttttgataccaatgccttgccaatcattgcaccagttgcatttattttggtggctgaaaatcttggtcatatcaaagcggtgggtgcgatgacgggagaaaatttaacaccgtatcttggcagagcatttgtggccgatggcgtagcaacagcattatcagcaagtgtgggcggcacaggtatgaccacttatggcgaaaatattggtgtgatggcggtaactcgtgtctattcaacactcatttttgtactggcaggcatatttgccatgattttgggattttctcccaaatttggtgcaatgattcagaccattcctagccctgttttgacaggggcgtccattgtggtatttggtttgattgccattgctggtgctaagatttggattgataataaagttaattttgccaataataaaaatcttatggttgctgccattaccatcattttgggtacgggtgattttggtttgatggttggaaattttaatcttggcggtattggtacagcgacttttgcggcaatcattctacattggtttttaagtcttcgagagttcaattcttcgagagttaaataatggcaaatcattggtttaaaaaagtttacacaaagtaaaattttcgtgatttatgagaaaatttgttatataatcctgacatttgccaagtaaggcaaattcaaagcatggttataaaacaacggatggcgtttatgccatctttttttggattgaaaaattatgtacgataatccgatatcttgtttggctaagtctggatttgttgatgggctgcattgtgtcgtaacgactgtgagtacgccgctttgggatatactgatttggatgctgattggtattgggctattttttacgctattttcaggtgtggcacaatttcgtttatttggccgtagtatcaaatccatgcttggtagtcgcaatcagcatgatgatgcaggtatttcaggctttcaggcatttgtgacagggttggcaagccgtgtgggcgtgggcaatgttgcaggtgtcgcaattgcaattggtattggcggtgctggtgcggtattttggatgtggctgattgccttgattggtatgtgttcagcattagcagagtcaagcttggcacagttatttaaggtgcgtgatgccacaacaggtcagttcagaggtggacctgcgtattatattgaacaaggtcttggtcaaaaatggcttgggtgtttgtttgccttggcattgattgtgtgttttggtttagtttatcaatccattcaatctaataccatcacacttgccatacaatcagcattaggctgtgtggtagaagatgccatttgccaaaatcaatggcaaagttataagcacatgattggggcgttgttggtgattttgaccgcaccgattatttttggtggcattcgccgtgtggcaaagattgccgaaatggttgtaccgatcatggcattgatttatattttggtggctctggctattatcttgatgaacataaccgccataccatcaatcattgcactgatttttgaaaaagcatttgtttttgaagcagcaggtggcggactctttggctctatggtatctgttgcgatgatgcagggcattaaacgaggtttatactcaaacgaagcaggtcaaggctctgcacccaatgcagctgctgctgccagtgtcaaacatccgttagaccaaggcatgattcagatgtttggggtatttgtggatactttaattgtttgttcatgtaccgcatttatcattttattggcacaaatgcctgacaatgcagccaatttatctggtattcagttgacacaagcggcacttgaaagtcatgtgggtagctggggccagtattttttagccattattttatttatttttgcattctcaaccatcattggtaattatgcttatgctgagtctaatatgcaatttttgaaaaataatacaaaagttttgacactgtttcgcctgctggtattgggatttgtgtactttggtgcggtcgtaaaagttgatgttgtttgggatatgggtgatttgaccatggggacaatggcatctattaacttgattgccattttattattatcaagatatgtttttgtgctgattcatgattatcaatcacaactcaaattaggtgtagcttatcctatttttaagcttgacaaccatcccaaacttaaacaaaaagtcaaatctgatatttggtagcccagttggttaattaaaaatccagttcttgagactggattttttttgtgtattattagaaagtctgcctttataacacgagttatactggatgatttataaaaatggattgtttttgtatcaaaatttcaccatcattatattttaagggtgcatactctatatgggtagataatgatgtaatactaagcgtaactttagcatccataatggtgaaatacctgccatgccttgagtcatttttccttgatataaaataacaaacgatggcgtcacttgtccttgccagttggcgaatatttgtccatcggtatcattaatagtcgtaaaatgatattgatgtctttgtaaatattgaccaagttgtgcgttatctcctgatttgacagcgatactgacgacagaataaccatcttggtgtagttgattaactttaggtgaggtgatggtgcacacatgacaccagcttccccaaaaatataccaagacaggtgattcttggctgatggcagcaatatcaatgggagtaccttgataatcttttaattgtaaattgggtttaacgggcatgataggctgacgcaaccagttaatcaacagataaatgatgagaaataataccagatatttaaatatcgctaatgatgattttaatatcatgggcaaggtcggtaaacgcatattcatcataatattttatcgtgataagcctgacttattttaaagcattgattaacgattgtgctaactgatcaacaagcgaccaaaacaaaatttggcatgataacgagttatctgtagcaccatcagccatatctgtaacaatcatcggctgatattaaaatcctgtccgaaataataccccagttgtcataaatgccagccccaatacggttaccaagataatatgtccagcaaatatatggcgtagcttagcattacccaagtctttttttaatcttggaatgacgataagctgagcggataaagccgtcagtatggtgaatattagccatgtgattttcatgctaatcagtactgaaatttggttatgataatcagtgagcatgccaaagctgggcaaatatttatgtgccatataaaagcccgtcaagacctgcacaatcaaagcagtcatgcccaatttttcaaaactattttcaaagtttaagatgggttggctgtcctgatgacgcacagccttgggtaatatgcacagacacagatataaatgaccaccaacccaaatacaggcacccaaaatatgccaaaataataaccaaaagttcataaatcgccttgataaaatttaattaaatcattgcttatgagtacaaatactgatgctgtgcgtcttatgagtataaattctatgatgataaagtgcggtattaacacgagataccagtcatattttttacaaaccatcttttttatgaattatttttaaatgatggtattgtgatttagcgttctaaatattgaagtttaccctcaacaccatcccatttttcatagtcaggtagggcgtcttttttctcggtgatgtttggccaaacagcggataactcttcattaatttttaaaaattcttcttgaccgcttggaacttcatcttcagagaaaatggcattggcagggcattcaggttcacacaaagcacaatcaatacattcatcaggattgatgaccaaaaaattaggaccttcataaaagcaatcaacaggacaaacttcaacacagtcggtatatttacagcggatacagttatcagttacaacaaaagtcatgttcttaccttagcgattggctggggcggtaaattgctgcccgtaggaataaaaaattaaagaatgacaaaaaagcacaaaatggacagctgtccaaatcaagactattttagcctgtttatgagattttctcaaataaaagtctgatatttattatgctaaaagtgaaaaaagatttccaaaataagcaaaagctctaagcgattgcaaataaatatcgcttagagctttgatgatacgaatcataatcatttagataaactaaaatgaatatcttggatatatcaattaagcattaaaatcctgtgagcttgtctcttggcgttgagattgcttggcaatgttatagcattcttcaatgtgatcaaaagcaatttttttaaaaatcatatagcctaacgatgctgccaccattgagccacctaatgggataaatttactgatttgcttaccaataaagcgtccgccaaaaccttgaatggtcttattaacgacgccacgagcagcaatcaagccaccaacagagacaatgcgatctttgatattttgcttgcgtgcttcttcggttgaggtatctaaattggctttatcttttagaccaaagcgttcggtaatttcaggtaacagcttagttagcattgccacatcaacggcaacatctaaaaatggcaagggaatgacggcagcacctgctgagactttggctcgagatttggctaaagattggcactcagaacggattttttctaaatctaaggtggggtcaatttgagtggcgacaggctgaataacaggcgttgacatggttattttccttgagtaatttaatgcgaatgcggtatatgctgtctggctattatatatatgtgtcatcttaatcgttacattttacgataattataaaaagttacaagtaattttttttgtgtgctttgtattgcttatgtcaatggttcggcagggtatcatgtataatgacagtagaatatataatgacagctcaaccatgcttaagctgacttgggcgaaaaccagtgatgagtagtgtgataccataaatgattgccccaaaaccgcatatgcccagcaagatggcaattttgagccagtgattagcatcaattggatataagggcaaaatgacagataagctaatcaccatggcaatattggcaatcacaaattgtcgtatcatctttttccagtgagtaccaaaacgatagataccacggcgatgtaaaacggcatagagtagacctgcgttaacaaaacttgctgctgtggttgccaaggccaatccaccatgtaaaggcagtttcattaaataaaatagcccaataaatacgacgctaaaaatcatattagcaaatactgaaatgatgccaattttaacaggcgttttggtgtcttgatttgcaaaaaatgcaggtgcaaaaattttaatgagcataaatcctaagatccctcctgataaagactttagagcaataccactcatcaaggcatcttggtgggtaaattgaccacgcacaaacaaagcatccatcaaaatatctgataaaacaaatatcgcaagactggctggtataccgatgacaagaattaagcgggcagcccagtctagcgtttggcgaaaattttcatcatctgacttggcacgacttgatgataggcttggtaaaatcaccgtaccaatcgccacaccaatgagtcctaatggcaattcacttaagcgttcggcagcatacatccatgatactgaacctgcaatcattaatgaggcaaatacggtgcttaataataagttaatctgggtgacggataccccaaaaatggcaggcagcatgagctttaaaatacgcctaacgccttcatctttaaagctaatactgggtggaataagcagtttttgttgccaaagctgtggcaactgtatgagcagctgcaaaatgcctgaaatggcgacagcataacccaatgccatgattggcttatcaagcattggtgctaatattaatgtaccgccaatcatacaaagatttagtaatacaggagcaaaggcgggtgctgcaaatcttccataactttgtagaatgctaccaaaaaatgccgtcatggagacgaataataaataagggaaagtcaagcgtaacagcttggcggtagtgtcaaacttttgggggtcatcggcaaaacctggtgcgaataaatacaccacttgaggtgccaaaaagataaccgccaccgtcaatacaagtagcaccaaggataatacgccagagacacgagcaatcagcagttgcacctcagttaaagtgcgtgcttctttgtactcagttaatacaggaacaaaggcttgggaaaatgccccttcggcaaacaggcggcgtaaaaaattggggattttaaaggcaactaaaaacgcatccatcaacccaccagcaccaaaaacactcatcaaaaccatgtctctgattaaacctaaaatacgagaaagcatggtcatggaactgacaatgacggtggagcgaaagagccgagattttgccatcttaatataaacttatcaaaaatgtgttattttacttggtttttcactaatttgctcagttttcttggatactttatcaataaaagtgataaaaattttgtaagctaagatgtcaagcgatcatgacttgattgatttaatgaactcaaaggatcttggctaaattaacaagcgtctaaatcatcatttgagcgaccaaagcacgcagcttttgccagtcaaaatacttacctggatcagtttttcggtggggagcaatgtcgctatgccccattaaatggcggcgtgtggcaggataggcatcataaatagcaacaatgatttgaccaagagcttgatactggacagcttcaaagggtatatcatcagccccttcaagttcaataccaatggtgaagtcgttgcagttttgacgacccaaataggcagattgtcccgcatgccacgcacgatcattaaaattgacaaattgcgtcacgctgccattgcgttcgatgaataaatgtgcagatactttgagtgtatgaatgccctgaaagtatacatgatcatcggggttgagctgattttgaaaaaaagccttgacatgatgtacgccatcggcattgacttgcccaaactgtgaaggaggtaggctgatattgtgaataacaatgcctgttattagacctgttttgtcagcaggacgagcattaaaattttcagattggatgaatgtcgcaccctgtaaaattccatgttgtatcacaaaagctgaacacataagatagaccgatttgactgatgataaaattattttagcataatttatcatatcaaaaacagttcaaaaacagtcaattgctgggattaagctgtgctacaataagccgtattattgagattttggaagatagtatgaagcataccaccaaatttagtgccatatctttgggcatctttatactgccatttgtgatgagtttgccatcttatgctgccaatgtcatcactgataccactcaaatcaagccaaacgctgttagcagacaagatggcttcgttgatacaaaagtcgatcagatgataaatccttatggactaagtgataaaaccttacaaagcatcagccaatcggcagcgtggcggcgactgttattatttcaagatacgcctgttgagcatgataacagcagtattgataaccctaaattttttttggcacaaaatgggtatcacgatgcctatgctgaacttatcgccacattatccgccatgcaaagaggtgatggtgacgccgtatgccgctttgttgcacggacgcattttttaacccaagcgttggcagctcaagatattgatagcggtgttgatgataggcagtgcagcgattttcatgcctttgccgatacactcaatgccaagcgtttgtcgctgatttttgccgaagaacatcccaataatattgcttctgcttttgcgcatgtgctgatgcgtgtcgatgatggacaagatgaagataaagccgccacggcgattaattacaccgtacagcccaacaaagctgatggcgtcattgtctcaacagtcaaatccgcctctggaggctatccggctgtgatggaaattatgccttatcaaaaaaaggcagatgactatttggtcaaagacgaacgagatttgtggcaatttagtctgaatttaacacccaaagaagtgacgcagattgtccgtcatatttgggaggttaaagagatgaagcgtccgtatttttttacgcatgataattgtgcgaccgaaattgtcagattaattgatgtggttcgccccgaagggaatatacaagctgatatcggtaatattgccattccctcacgcattgcagcgattttaagtcaggcgggtatggtgacagaccaaaaatttatcccatcaaactcaaccattaggcaagctaagcttaataatggcgagaattttgatattgcccatcttgccccaaatcgcaatagccctgtacatgcaatgcctgtgcatcggtttggttttggtataggtctggatactcggcttagtgatcgtgcagtttatggcattcaattaaatggtgcctatcaagatttactggataatcctcaaggtgttaggtctttgttggatttacaagtgatgtcagccaaactgattactgatggcagtacgcttaggcttgaagacttaacgattttttcaactcgtagcctaaatcctgccaatactgccaaaaataatgcaaccgttaaaaaaggtgtgggcttggcaatggcatttcatacaggtttgacacgaacgattgatgcatccaataaagccaatcatcatcatttggtgttggatatggatataaaggcaggcaaatcatggaattttgggcaggttcgccaaaatagcggcgagcttgcgaatacgacttgttatacattggtaggtggcggtacacagatagggcgggttaatcaaggctatcgtttgagagctggtactgatattggctgcattcattatgctaacgagaatttgcgtggtttaatgcagttatcattgccttattattaccattttgataatgcaccaagtgaccgctcgggttattttcagcctgccttgagtattggcatacaagcagatatcgcaccttatcatgccgtgcgtctgactgcccagcgtgaaaaactaaacagcgattatgcaactcaagcgatgttatcagtacaaaggtatttttaagatggcaaattatttaatgattggtcaaggtaatatcggcaagcctttggcaatcagattggcaaaagctcatactgtcaaaaccgtggctagacgcttgcatgaatatggcactttggctaaatatattcattttttacaaaaagacgccaagactttgaccttggatgatgtcaaagataccacgcaccttgccatcattatcacgccatcaaatatagggcgagcgtcggctttggattatcaaaaaagctatttggcagtgtgtcagcatattgtaggtttggcaaatcaatcatgtgagtggcagcaaaagctaaagcaagtgttatttgtgtcatcaacatcggtttatggtcaaaaccaaggcgagtggattgatgagaccgcgcctgcactacccataactgataccgctcagatattaaaagacgccgaagacttgctttggcaaacctttggcaagcgtgccattattgtgcgtgctggcgggatttatcataaaaatagcataagactcattgagcaggcacgccaagcccatttggttggtattccacgccattattataccaaccgcatcatggatagcgatttggtgaattgtttgtatcaaattttggtgagtgattgccccaagtcgttgtaccttgcgacagataatacacctgtgacaagttttgaggtgcttgagtatatcgcaaaaagtctgaattacccatctgtcacacctatctttgatccgccaagtggcaaacggattattgcaaacattaataccaattggctaagttatcctaattatcagataggatacgatgctgtgattgcacatttgatcagatcttagtcgactatctataccatcttggtatctaaaacgccatttatttcccataaaaaaagcggattaatatccgctttttatttggatttaccaataacccaacactttccaccatagaccaccaatcagggtgaacacgatgatattaacgacgctcatcacaaagccagctttccaccattctggcaaagtggtataacctgatccaaaaatcacaggagaggtgcctgtggcatagtgcgtcaaagtcatcatgatgcttgatgccgccgccatcagcaaggcaaaaagcattggtggcacacccaaggcaacacctgccgataaaaacgcaccaaacattgcggtaatgtgcgctgtcgtactggcaaacatatagtgtgcatacatatatgcgatcagtaataaaagacctgctgataagccgctcaaacccaaacttgcgatgtgtgtttcaaggctggatgaaaaccatgtaatcaatccaagcttatttaaaaatgtcgccatcataatcaaagctgcaaaccaaacgatcgtatcccaagcacctttttcggcagtcacatcctcccaagtcagcacacctgataagagtagtaagcttaaaccaataaaggcggtagcggtagcattaatggggaaattaaataataaatttggcacgcctgcccaacacagtaacaaaacggcaaaaatcgccaacatgatgatttcatctcggctcatcgtacccatgtcagacagttttgctttggcaaatgttaccgcattgggtgtatttttaattttgggtggagagacaaagtacagcaccaacggcatcaaggcaaatgccaccaaacctggaattaacattgcccacgcccattgactccagcttaagcgaaactcactgcccaaagtttcggcgatgagattcaccaccaatgggtttggtgctgttgcggtgatgaacattgctgagctgatggggttactatgataattaaccaaagcaaggtatttaccgatcgtatcttgagtgtttttacttggtgatgagtcaaaactgtcagcaattgcccgcataatcggatgcatgattgcaccaccacgagcggtattactgggcgtaacaggcgctaaaatcagctcactagtagccaatacccaaggtttttttaccaaagatggcaatgaatatataaccaatacgcgcacccaaacccgtcttcagcaaaccacgagaaatcatgatagacaccccaatcagccaaatcagtggattggcaaagcttgataatgcatctttcatggcatcattagcactgccaccatcggcgactgtaatacctgtaacagcgaccaaagtgattgccaagattgataaggcaccaatgggcattgctttaccaataattgcagcaatcacgccaacaaataacgcaagcaaattccaagcttggtcagtcacaccctcaggtgttggaattaaaagaatcgtcaccgaaagggcaatggcgatgactaatggcatgggtttaaagccgattttcacagacatttttatacctatttatttgtagaagtgaatataaaaccacagtacaggtgttttaattattttttgagtaatttaaaattattttaattttattatacgataataatagtttaataaaaagtcataaattaaaatgatatcagttaaaccattgggtaaataaataccatccatctgataaattctcccatgaaaatccccacaaactggcgaatttacggtaaaatagttgattaaatgtcattttttattataaatcatcagagagttatcccatgagcatagacaatttatcaaccaattataatccagcaaatattgaacaaaaatggtacaagatttgggaacaacaaggctattttaaaccccaaccaaaccccgccatgagcgacaaacaaaacgctttctctattgccttgccgccgcccaatgtcacaggttcgctccatatggggcatggctttaacaacaccatcatggacacattaacccgctatcatcgcatgatgggtcataacacgctttggcagcccggtaccgaccacgcaggcatcgccacacagatggtggtggagcgtcagcttgggttacaaggcatcagccgtcatgatttggggcgggagaagttcattgacaagatttgggcgtggaaagagcagtcaggtaacaccatcactcgccaaattcgccgtttggggtcgtccgtggactggtctcgtgaacgctttaccatggacgacggtctgtcgcaggcggtcaaagaggtgtttgtgcggctttatgatgagggcttgatttatcgtggcaaacgcttggtaaactgggacccaaaactacacaccgccctttctgacttagaagtagaaagcgtagaagagcaaggcagtttgtggcattttagatatcattttgccgaccaaagtttgacaacccaagacggtaaaaattatctggtggtggcaaccacacgccctgaaaccctgcttggcgacagtgcggtggcggtacaccctgatgatgagcgttatgcccatttgattggtaaaaccatcgtcctgcccattagcgggcgtgaagtgcctatcgtggcggacgattatgtagaaaaagattttggtacagggtgcgtcaaaatcacgccagcccatgactttaacgaccatgagcttggtaaacgccacgaattaccgctcattaatatttttgatgaagatgcgtgcataaaagctgaatttgacttgattgccaaagtgggagagccgatttctaaccacatcaccgcccctgccgactatgcagggcttgagcgttttgccgctcgtaaaaagctcatagaacaagcccaaaacgaaaactggcttgaaaaaattgaaccttataccctaaaagccccccgtggcgaccgctccggtacagtcattgaaccacttttgaccgaccaatggtatgtggcgattgaaacccttgccaaaccagcgattgaagcggtgcaaaatggcgacattcaattcgtgccacaacaatacaccaacatgtacatggcatggatgcgtgatatccaagactggtgcatcagccgtcagctgtggtgggggcatcgtatccctgcatggtatgatgacaatggcaatgtgtatgtggggcgtgatgaaagcgaagtgcgtgccaaatatcacctaggcgatatcccccttcgccaagatgatgatgtgctagatacttggtttagctcggctctgtggacatttagcacgcttgactggacaggtcagaccagctttgatgattatggcgatgccctacaaacctttcacccaacaagcgtactggtaacaggatttgacatcattttcttttgggttgctcgcatgattatgatgaccatgcactttatcaaagacaaagatagcaagccccaagtcccctttaagaccgtttatgtgcatggtctggtcagagacagccaagggcaaaaaatgagcaaatccaaaggcaatgtgcttgaccccattgacttaattgatggcattgatttggaaaatctggtcaacaaacgcacccaagggttgatgaacccaaaagaggcggacaacatcgccaaacaaacccgccaagaattccctgacggtatcccagcctttggcacagatgccctgcgatttacctacgcatcacttgccagcacagggcgagacattaactttgacttaaaacgcattgaaggatatcgtaatttttgtaataaaatttggaatgccactcgctttgtactcatgaactgcattgacaaagatggccgtccccaaaacattgataaatccgccaaccctaagctttggcagttgcctgaacactggatcatcagccgcctaaacgccaccatcaatgacattcacgagcatataagccagtaccgttttgacttgatgagccaagccatttatgaatttatttggaatgaatactgcgattggtatgtggagtttgccaaatccagcttaaacgcatcaggacaagacagcacagtcagcgatgagcgaaaagctcaaatccgttatgtgctactctttgtgcttgaaatggcaatgaaaatgacccaccccatcatgccctatctcaccgaagagatttggcaaaccatcacaccactgctgggcaaaacaggtaaaagcatcatgctaagcacctaccctaaatatgatgacagcaaaatcaacgaacaagccgaaagcgacatggcatggctacaaagccttatcggtgcggtgcgaaacattcgtggcgagatgaaactgggcaatgccgtgcgtctgcctgtgctaattcaaggggtaagcgatgaacaaaaagcaagccttgtacgcattgacaatcaatttaaaacccttgccaaagtagacagcctaacgattgtcaaaactggcgaagaggtgccattatcatcatctggcatggttggacaaatgaaagtgcttgtccccatgaaaggcttgattgacccgaccgctgaactaaaccgcctaaataaagtgcgtgataaactgcaaacccaagcagatgccattaacaaaaagctgtccaatgacaactttatcgccaaagcccccgctcaggtggtagaagcagaacgagccaaactctctgagttacaagggcagttagcagaagtggagaagcaggtgggggcgttggggaatttgtgatcctaacaacagcaaatagatcatcttttggtctatgtgcttaacttattatgataaacaatagaaaagtcatgaaaccttttataaaatgggcgggcggtaagaattctttgcttgataaaattcaaaaacgcttgcctgattttgtttactcacaagatttttgtttggtagaacctttcgttggtggtggggcggtgtccttatgggcattgtccgatttgccacatctaaaacagcttatcatcaatgattacaatgccgatttaatcaatgtttatcaagtcattaaaaataaaccagatgatttgataaaatatattgaaaatatgcaaaatcattatgataaactcacagacatagaaagtaaaaaaccttatttttatcacaaacgagatgtttttaatcaaagaaatggcaatgatgttgaacaggcaggtttatttatttttttaaataaatctgcttttaatggcttgtatcgtgttaataaaaacaatcaattcaatgttcctatcggcagttataaaaaaccaacatttatagacaaagacaatattttaaccatttcaaaaaaactacaaaatacaaaaatactaacaggggattttgaattggttttaaatcacttgccaaataattttccttgcctattttatcttgatccaccttatcgcccaatcagtgatacagcaagttttacttcttattctgataatggctttgacgataatgaacaaaaacggttggcaaacttttgtaaaaaaatagatgagatgggtcattactttttattaagcaattccgatccaaaaaataccaatttatctgatgatttttttgatgaattgtatcaagattttaaaattgaaagaatacaagcaaatcgtgccattagtgccagcagtgttggtcgtaaaaaaattaatgagatcattgttagcaatgggttttaatatgaaattagcatttgatgattttttaaatagcatgtcagaaacaaatgccactttggattattttactgactttgataaagtaaaaaagaatgtcgctcaaattgagattaaattaaatcaactgaattatttgttaggcaaagatgatttgacacaagccgtttatgaactatatgcagaatgcccaaatgcgttttgcattttagagatattgattgcagttagaaaaaaggaacaaaagaaaagcctagatgaaaaaggtcaagtagtaacgttaaatagttactttcaatcagaggataaaattatagattttcttaacaatacagggcttgctgatgtatttagagataaaaacatcaaaaatttagttgattatgtgtttggcattgaagtaggcttggataccaatgctcgtaaaaatcgtggcggaggcaatatgtcaaaagctgttcaatcgttatttgaccgtgctggcatttattataaaaaggaagttagaaataccatttttacagacattgaaagtttgggagctgatgttaagcaatttgattttgtcatcaaaacaaaaagtaaaacttatgtgattgaaaccaattattataatagcggtggctcaaaattaaatgaagttgccagagcttataccgatgtggcaccaaaaattaaccaatacccacagtatgagtttgtttggattactgatggtcaaggttggaaaactgccaaaaataaattacaagaagcctatattcatattccctccgtttataatttatacactttgcaaagttttattgaacagataaatagtgaaggtgttatcagagattggtaaaatgagactaaatccttattttgaagcaagtgatcaaacctttaatatctaccaaggtaattgtattgatatcatgtcgcattttcagagcaattccatagatatgatatttgccgatccgccttattttttatccaatgatggattaacttttaaaaatggtatcatccaatcggttaataaaggcgaatgggatacaaatgacaatgaaaacagcatttacaattttagtcatgaatggatagcacaatccaaaagattattaaaagacaatggcaccatttggataagtggcacacaccataatatttttaccgttggtcaattattaaaagagaataactttaaaatattaaatataatcacttgggaaaaacccaatccaccacctaatttttcttgccgttattttacttattcaagtgaatggataatttgggcaagaaaacattctaagataccacattattttgattatgatttgatgaaaaaattaaatggtgataaacaagccaaagatgtttggcgattgcctgcggtgggtagctgggaaaagacacagggcaaacaccctactcaaaaaccacttgggcttttatctcgtattatattatcatctacccaaaaaggcgatttgattttagatccattctcaggttctggtacaacaggcattgcagcaaccattttgggtaggcaatttatcggcattgataaagaattggaatttttagaattatcaaaaaggcgttatcaagcaattacacccaaatcaaaatatgaatttaaacaaaaaattcgtgagcagattagtttggtgtaaaggcactttaagatgtcatcaaccccacggccaccccaaacaccccacaatgagccgccaccaccgtctcaatatcaggtgaatagcccccacccatgacaacagtgacagggatgcccgccttgtatgcggtggtgagtaccagtttgtctcgctcataacagccttgtaagctaagcgataatttacccagtttatccgtcgccagtacatccacgcctgcttgataaaatagcatgtcagggtcaaaattatggataatcttgggcagggtcttgcccagtatcgtcaaatatgcctcatcacctgtgccgtcatcaagctctatgtctaggtcggacggtggtttgataaagggatagttctttttgccgtgcatgctaaacacaaagacagcagggttatttgccatgatggaggcattgccgttaccttgatgcacatccaaatccacgcttaaaatgcgtttggcttgccctcgtgctaagagcaaattgctcgccacgcacacgtcattaaacacacaaaaaccctcaccgtggtcagcaaatccgtgatgcgtgccacctgatactgacaaagagatgccatattttttggcgtacaaggcacattcgtaagtggcgtgcgtaatgtagcgttctcgcttgatgagactggcggacatgggcagaccgattttgcgaatctctttgtccgtgagcgtgcctgtttttaatttgtgccaataatcagcggtgtgcgtgcttagaatctcttgttctgataacagctcgggatgaaataaattatcttgcgtgatgatgccatcggtaagcagttttttggggatgaggtcatattttgccatgggaaagcggtgagagactggcaggtgatgacaaaataggggtgaataagcaatttttagcatggcttaaccaaaatgcaaaaatataatcaaatctatcactgatattgatcggttggctcaaagtattgatctaaaaggtctttggtatgagcatcggtagggtgctgcaggtaatcagtaatgatggggctggggtcggcttcataaagtacatcatcatacagcctttgggcaagttcagttaggcttgccacaccttgcaaatgcacgcccaaagcgttatcgcttaatggagtaaattcagcatccaagctaactttggcgtgtacctcgccatcggttgggtcaagctcaatactcccaaaagggattgatagatttgccttagcgatcgccattagcatcatcgcaaaatgactatcaggcaccacttcaggcaaaataccaaagatagaaaccagctggcttgtttcattgatacgaaacacacaagaccattgatatttagtataactaaataatataatcagatgatgaatttgaggcgttatcgtgccatcgtttgatcgtgcttcatattgccagccatgacgctttaggtattggatgatatgatcggtgatgggctgctttgtgtctgattgatgctcagtgatggactgtgcgttcttatttgagcgtttggcatctgctcgtttgagtaatgattttaatttttttaacagtttcatcacagttatgaattcattaaataaataaatcgttggatggctttttaggatcgatatggcaagatttttatcaatataaaatttgggcaaatctgtgttaattttttatgaaaaccaatcagatacttgagtaaaaatcacacaccaacagccaaaatatcataaataccaccaaacaactcagatttttaacgctaatgtacgcttggtagatgaacttgtattgtatcataaaatggctgtctactttggtatatttatagaccataagtgataaagctatgttaataggttgggtgatatggcggtttatcatagctttatttgatagggttgtggtaaaattaggggttaatttatataccacagttaaacccatcattttcatcattgataccaatcatgccatgacaacagtaactaagcccattgataccgataataagccaatccttacgattgataaactggatgtacagcgtggtgattttgtgctgtgccaagaggtgcagttgaccttagagatgggtgatgtgtgtcatctgattggcgaaaatggcttgggtaaaacaacacttatgtctcagattgcaggtttattacctattattcatgggacttgtgtgtgtgctggtgctatggtatatgtctcgcatcagcttggtatcagtgcagcgttgactgtcgcacaaaatttgcgatttttgttgtcgctatatggtgtggatgctgatgatacattgattgatgaagcattatggcaggtgggacttgaggggctgcaagatatctcaagtgttcagctgtcagcaggtcagatgcgacgagtgggattggctcgcttgtttgttttgacaccaaatgaggcatcattttggctgcttgatgagccactgacggcactagataccaccatggttcaaagacttgaggcgtgtattttagcatttgcaaaggcaggcggcgctgtactgatggccagccatcagacgataaaagcgacaaatcggcaactgaatttggcggaatttgcgttatgatgactcatccttttttgaccatgattacccgtgaatggcaaatcaaacgacaaggcacagttcagtggctttatcctttggtgctgtttttattgattattacactatttcccttggcgattggcaatgaaccaaagcttttactcagattggcaccttcggcggtgtggattgctgctttgcttgcattggtgattggtgtggatgatttattccgcagtgagtttgataacggcacattggcacaaatggtcgttgccaaatcacccttaatcatttgggttttggcacggcttttggtgcattggttgtttagtgcaggtgtggtagcaatcttatccttattagtgattatattgtttgagatgccatttggtgaagcgggaatattgatggtttcgatatttgtgggttctccgattttgcttggattgtctgcgattgcaagcagtttgactttaactttaaaaaatggtgcagttcttgtccctttgattgcattaccgatgcaactgcctgtgctgatatttgcaacaggtgcggtggacttatatgccacagagttaaatggcttaccaaccttggctttattggcggcaggcagcattatcacggtgctggtgacgccatgggttgtcgcctcagtactcaaaatggcatgggcagattaatcatcatacagtatcatcaatccagtggtaggctgtcatgctacgccaagtgatggcagtcaaaaatcggcatggcagcacggattttagcttgcctatcagcgtcataatcagcataagcaatacaataaccgttgtctgccacctcagtgcgaccactgtctgcgatgatttgaccatgtgcattcacaatcatggaatgaccccaagtctggcgtatgctattaccgatctgatggataccgccttgagctgaaccgataatcaggcattgactatccaacgcacgtgcctgtagcagcatttgccaatgtgcctgacctgtacgatgtgtaaacgcagctgggacagtgatgatgtccgcccccatttgtctgagccgctgagcaaaggcagggaatctgacatcaaagcaaatcatcatgccaacattgatcgtctgcccatgaatgatgcacggctcacagaccaatcggctgccatactcaaatgtcttaccttcatcatagttgcctgtgctgtcatcaatagttgcacgaaatagatgaattttatcatatcgtgctttgatattaccttggtcatcaatcagtagactaacttgtctgataagatcgcaaggcacatcactgccatcgggacgagttgggcaaggtagcgtacctgctaatagatgaacgccatatgtcttggcaagcgattaataaaattggcagatttcatcatagcgagtggcaagctgactttgacgacccataacgcaagcattttcgggcaatacgataaatttagcatcacaggcgacagcttcgctgatggcattattgataatacctaggttggcgtcaatgtcagtttggctatttagctgaatggtagcaatgcgaatggtcatgacatttccttgattttttagatgattttggattaacctatcgatatttgtttggattgtcaaggcaatttagatggatttgtacaagatcatcataaaaatacttgcaaaattgggtaggctgtgcgatagtaacaatacccaatgacgatcactaacaggcatttgatcatcattgggtatttttttgggtactttagattgtcgaagattaaatttgatatcaatacagcgtgtatcagccaccaccaacggcttgcacaacttcgatactcataccatcttttagctctgtgagcgtcaagcgtgattttggtacgagcatctcatcaatctccactgcaaatcgcccctgggttagaccgtgggcatttagcaattcaaataccgttgaatgatccgactgggtcggttgtccgtttaaagttacttgtttcatagtttaaatttttgattaaattttggttaaattgggttaagccaagcgagtcgttttggcgatttgtaaggcaaacacaagccaaccgatgatcagtaaaccaccaccgataggtgtgattgccccaagccaacgaggcgcaccaagtgccatggtatacagtgtgcctgaaaatatcacaatacccatttgtagtaatacgccagccaaagcagagcgatatcgcccaatatgctgcaaaacaccaataaccaataagcccaacgcatgaatgaacaaatacagcgtggcagtttgccaaatctgtaacgcatactcatcagcaatgtgcttaagtccatgtgcaccaaatgccccaaaggcgacacctatagcaagattaagcgctgccactaacagccaattgattttaacagtcataaagccttctatttgatggtgattatgaagaataatacaacaaatactaatacaacaaattagcccaatgaaaccttttattcatctataatcatacgatcaagcgtaatagcttctttgattttattcatggcatttttttcaatttggcgaactcgttcagccgaaatattataagttgccgcaagctcatgtaatgtggatttttggtcagccagccaccgctgcgtgatgatatcacgagagcgttcatctagggtttccatcgcatctttgagtgcggttgtggtattttcttcccaatctgcctcctcaacgacatcggcaggattgaccgcatcctccaaaaatagctgaggggcatagcgtccttcatcatcatctgaatcttgtgcctcaaaagacgcatcataactggtcaagcgtgattccatctccaaaacttgcttgacagtcacattcaaatcattggcgatggcagttgcttcatctaaagtcagctgattagaggatttttttaggctgcgtaaattaaaaaataatttacgatgtgctttggtggtagcaactttaacaatacgccaatttttgatgacaaattcatgaatctccgccttaatccaatgtaccgcaaaactgaccaaacgcacccccttattaggatcaaagcgtttgacggctttcattaagccaagattgccttcttggatcaaatcggcttgggataatccatatcctgaataactgcgtgcaatatgaatgacaaatcttaagtggctcatcacaagcagccgagcggcttcaacatcgccatcatgataataacgctcagccaaggcacgctcttcttcgggtgttaaaataggaatttgatgcacagtattaatataagcacccaaattcaccccaggtgctgccaaatgggtcggcatggctggtactagatcgtgcgtcgcaatggcatctgtgtcagatggtgtactgtgagctttgggcgtagcagaaattttgggtttatcgatatcatcatcaatatcatcgatgatttcggcgtactcttcatcatcaatctcatgaaagccgtctaacgcttcaatcaaatcctcatcaaactcatcgtcatatgtgtcatcatagccttcatggttgtgatcataatcatcatcgttatcttgggtgcgtttgggtgccattttgtccctatatattctcaaaatcttgatactattgtaggcaattttccaaaaattagctagtatccaatcttttaatcacataaattttacaatctgtaaaatttggctaaccttaatttttatgccgagtttgataaaatctttttatattaaatcagttttatattaatttgcaggcttgataatgataaagtgatagatgggcgtctcattggtcaagtcatgactatgccaagtatgggcaatcagagcgtttttgttgcaataggtcactaagtctttttgagagttttggtcggtagcgattaaatacagcgcttgattatcggcgacatgacgcagtgtcactttggcttttaataagggcatcggacaaggcagatttctggcatcataaaacacctctacgatatttaaaggaaggtttaatgcttctagtttgctggtcaaatgagcgttaagcgtacttttatcttctgctgtgagcgtgtcaaatatatgatttagcatctgtgtcaccgaataaaattgacataaacatgatggggcggtggcatatttattagcattaggttttagcggcattaaggcgtttgaaccatagactctaagccttttggcctaacttggcttaggtgctttttgatggtatcgatgggtagaccttgtttttcaaggcgtttcgggataatttggctacctttttgacctttcatgtcaaacatcatgaataaatagtcatctgtctcatcccagctactcactgtatgccaaggtatggttgctgactgcgttgcacctgcacgcatttgcatacctcgcatttgtggtgatttcatcagatcggtggatgtaggcatcgccataacaagcccgtgtgattgtacacctaattgcagagtgtgaagctgttcaggcatttgggtacttgccacttgtttttcatattcacgcttcatataccatttcatacccaaggtacgagcaagcagatacacaccaaccaaaatcagcataagccaaaaaatgattgtcgaatagccactgacaaataccaagcctgcaatcgccgccacaaccatcagggcaatcacaatccactctgtgcgttttaaggactttagtgtaaaatgacttgtgcctttttcaaacaatgataactgtgctgcgtaaaattcagtttcgctcatgtttaaagcgatgggctttagcgtatagggataaagtgctttggtcattgagataaatcctaacgatgaatttgcctatattacccattttatccaaaaaaataaacccaaagttaatatttgtcaaaattttttgatttttaactgctttgatttgaaattggcttaagttttgggggaaaatttgctattataagaataagaataaattttattgttcatcattttagcacgccaagcgccgtttggggcgtttttgtgcttgataggatttgatatgttagaccctaaatttttgcgtggtaacctagaagagctaaaagccaagcttgcggtgcgtggttatgatttggatgtggcattttggcaggaagttgaaaatcagcgtaaatctatccaagtaaagaccgaagcattacaagccaaaaaaaatgcaggtgccaaaaaggtcggtgagctcaaacgacatggtgaagacacaagtgagctgatgaaccaaatgcaattggtcagtgaagccatgaaggctgccgaaaatgagctaaaagaactacaaaacaccatcacaaccgccgcactacaaatcccaaatctgcccgatgatagtgtgcctgtgggcagtgatgaaactgataatgttgaagtgcgtcgctggggcgtgcctcgtgagtttgattttgcaatcaaagaccacaccgatattggtgaaagcttaggtcagcttgattttgagttggcagctaaattgacaggtgctcgttttagtgttttaaaaggtcatcttgctaagctcaatcgtgcgttggtgcaatttatgcttgacacgcatacccaaaaatatggctataccgagatgtatgtaccttatatggttaattctgatagtttacaaggtacaggacagttgcctaaatttgaagaagatttgtttaagcttcgtggcgaaaaagaatattatttaattccaacatcagaagtgccactgaccaacagtgttcgtgataccattcttagccctaaggatttgcccatcaaactgaccgcacatacgccatgttttcgtagtgaggcaggcagtgcagggcgtgatacacgagggctgattcgtcagcatcagtttgaaaaagttgaaatggtgcaagtaacacgggctgatagctcaatgcaggcattagaggatatgactgcacaggcagaatatgtcttgcaagcgcttgagctgccatatcgtgttatgacactttgtacaggcgatatgggctttagtgccgttaaaacttacgatattgaggtttggttgccatctcaaaatatgtatcgtgaaatctcaagttgctcaaattgtggcgattttcaggcacggcgtatgagtgctcgcctaaaagatggcaaacacagtgaattggtgcatacgctaaatggttcgggtttggcagttgggcgcactttgttggcaattttagaaaatcaccaaaatgctgatggtacgatcacgattcccaaagctttacagccttatatgggtggacttgaagtgattgcctaagataaaagccgctttgatagcggcttttgaaagggtgattttagtattgccttttttaggcatttaaacaaggtaaattaggcatgattgccaaaaatgtacttgggtgattgtcagtatctgatgaccaaatttcaaagcccaaaaatactgaaaatatgatataatgaagcaaattttgttaggaactttgctgatgccaatcgaacttaaccaacgccataacgccaatgctatccgtattcttgcgatggatgccgtccaacaagccaactcaggtcacccaggggcaccgatgggtatggcggatatcgcagaagtgctatggcgagagtttttacgccataatccaaaaaatgccaaatgggtaaaccgtgatcgctttgtgctatctaatggccatggctcaatgttattgtatgctttactgcatttgactggttatgatttaagtattgatgatcttaaaaatttccgtcagctgcattcaaaaaccgcaggtcatcctgaatacggttatgccgatggtatcgagacgaccacaggacctttaggtcaaggtattgctaatgccgttggttttgcgttggctgagaagactttggcagcacagtttaacaaacctgacaatgcaatcattgatcattttacctatgcgtttttgggcgatggttgtttgatggaaggtgttagccatgaagcatgctcactggcgggtactttggggcttggtaaactgattgcttattatgatgataatggcatttcaattgatggcgaggttgaaggttggttttctgatgatactgccaaacgatttgaagcgtatggctggcaggtattaaaaattgatggtcatgatgctgatgccattcgtgatgccaccaatcaagccaaagcagaatcagccaaaccgacattgattatttgcaaaaccattattggtttgggctcgcctaataaacaaggtaaagaaattagccatggtgcacctttgggcttagacgaaattgctttgacacgcacgcaaatgggctgggcggacaccacgccttttataattaccgatgagatgtatcgtgcttgggatgccaccgccaaaggcagtaccgatgaagcagcttggaataaacagtttgctgagtatcaagataaatatcctaaggaagctgctgagcttttacgccgtttcagtggtgatttgccagagaactttgatcagctggcagatgaatttatccaaacttgcatccaaaaagcagaaagtatcgccacacgcaaagccagccaaaacgccatcgcagcacttgcaccacacttacctgaaatcttgggcggttcagctgaccttgcaggttcaaacctaactttgtggtcaggtgctaaaggtgttcaagagtacgccgatggtaattatgttcattatggtgtgcgtgaatttggcatgacagcaattgccaacggcgtggcactgcatggcggatttatcccctacacagcgacatttttaatgtttatggaatatgctcgtaatgctgtgcgtatgtcatcgctgatgaagcagcgtgtgatcaatgtttatactcacgactcaattggtctgggtgaagatggcccaacgcaccagcctgtcgagcagattgctaatttacgtatgaccccaaatcattatgtatggcgtccttgcgatactgttgagacagcagtggcatggaagatggcgcttaaaacaaaaaccgctccttcatcattgattttatctcgtcagaatttggcatttcaatctcgcagtgatgagcaaattcagaatatcgaaaaaggcggatatattttagcacccgaaaaaggtactcttaaagccatcatcatcgcaacaggttctgaagttgagcttgcgatgcaggcgtatgagcaactagaaggcgtgcgtgtggtttctatgccatgtgctgagatttttgttaagcaggacagtggttatatcgaaagtgtgttaccatctgatgttcgtgtgcgtgttgctgttgaggcggcaatcacggattattggtataaatttgttggcttagatggcaaggttgttggtatgacgacatttggagagtctgcacctgccaaggtattgtttgagcattttggtatcacaacccaagctgtggtggatgcggtaaattctttactttaaacgtatcagataataaaaaatcgggtgattgtatgacacccgatttttttattttaagtaatggttaaaaatgatgatggttagattgctcacatttatcagtatcaaaaattgatgaaatatgctaaaattgggaaaatatgtcctaattttgcaagggcgaaataagccactttaatcagcttgggggctgtatgtctgataaaaatccacaattttcacgcattttattaaaactatcgggtgaagcgttggctggcggtcgtgatatgggcattgatgctaatatcttggatcaaatgagcctatccattgcacatcttcgagggctgggtgttcaagttggtattgttgttggtggtggcaatttgtaccgtggtagtacgctacaaaaacaagggttggttggtcgtgtgacaggtgaccaaatgggcatgctagctaccgtgatgaatggtttggcgatgcgtgatgctttggtacgccgaaatattaaaactcgcctaatgtcagcgattgccattgatacagtagttgagtcatattctagccgtgatgcgatacgccacttaaataatggcgaggtgtgtatctttgtggcaggtacgggtaatccattttttaccacagataccgcagcgtgcttgcgtggcatcgagattgaagcagggctgattttaaaagccaccaaagttgatggcgtttatgataaagacccaacaaccgatgatgatgcggttaaatttgacagtttgagttttgatgaagtgcttgaaaaaaagcttggtgtgatggatttaacagcgattgcgttatgccgagagcataatgtaccgctacaagtatttgatatgaataaaccaaatgcgctattgaatgtggttatgggtgaggctgaaggtacacgagtttatcactaagcttagcatttataccttaatattcatataaaatttatttatatgaaatatgtgagataaaattgagttaaaaatttagacaattgtgatgattaaggaaattttatgattaatgaaattaaaacagatggcgaaagccgcatgcaaaaatctatcgaagctttggaagctgcttttagtaagctgcgtacgggtcgagcccatccagggattttatcaggcgtgatggtcagctattatggttctgatacaccgttaaatcaggtagccagtatcaatgtagaagacagtcgcactttattggtgcagccatttgagcggtctatggtacaagctgttgataaggcaatccgtgaagcggatttgggtctaaatccaatgaccgctgatgtgattcgtgtcccaatgcctgctttgaccgaagagacacgccgtgatatgcaaaaaattgctcgcaatgatgctgaacaaacacgcatttctgtgcgtaatattcgccgtgatatgctaagtgatattaaagatttgctaaaagataaagaaatatcagaagatgatgaacgccgtgctgcagatgacattcaaaaattaacggacaaattcatcgcaaccattgatagtcgcctagagaaaaaagaaagcgaactgatggaagtgtgattgattataaaatagcatgggtaaggagttttctttatccatgttattcatttatttagattagatttaaagttaaatgacggtaattgtaacaccatgacaacccaaatttgtgaatctttacccatcattcccaagcacattgccatcattatggatggtaataatcgctttggtaaatccaaacagctggcaacaggtgcaggccatgtggcgggtaaagatgcacttgatccgattgttgagcattgtttggctttaggggttgaggtgctgacggtatttgccttttcaagtgaaaattgggcacgcccaaaagatgaggtggatcttttgatgcgtcttttgtcccaaacgatttacgagcagctaccacgcatgaatcagcaccgtatccgtctgcgttttatcggtgatagaagtcaaattgatggcgacttggtaaagcttatggcacaggcagaagccaagacggcagattttgatgcgatgactttggtgattgctatcagctatggcggacaatgggacattaccaatgccgccaaaaaacttgccaaacaagttgaattgggtcacttatctgctgatgatatcgatatacaaatgataaaaacgcagcttgaattggcggatttaccttctgtggacatgctgattcgtacaggtggagagtaccgcatttcaaattttttactttggcagacggcatatgctgaattattttttacgcccacattatggcctgaatttggctgtgatgagcttgatgagatgattcgtatttttgctggtcgtgagcgtcgatttggcatgacaagcgaacaaatccaaaaaacctaagtgctgaattcaactgatagttaaagcgctttaaaattgataactctttgcaaggatgttttagtcatgtggcaacgaataaaaacggcaataattttggttttgattgttggatttgcgttatttgcaagctcaatgccgatttttgtgttgccactattagccattggggttttgatcgctgcacatgaatggacaaaactcatgccaaaatgcagacagcctgtacagtttattttggcagttttaatcatcaccatgttatcagttgcactgccttggacttgggtattttggtgggcagtatcgctgggtatttgggtaatggcaacggcatgggtggcacaataccccaataaagaacgctggtatggtaggcggctggtgtatatgggtgcggtcattctcaccgctgctatcaccgccatgtatgggctttggcagatgtcgccttggtggctgatgtatgtgtttttattggtatggtgtgctgatagtggggcttattttattggcagaaaatttggcaaacgaaaaatggcacccaatgtatcacccaataaaagtatcgaaggcttatgcggtggattgatggtctctggggtggtcactgtggcagttggttattatttgcagctgtctggtatgtcattggtattgtttttgattttgtcttggctaactgtacttgccagtatactgggcgacttatttgaatctatgctaaaacgccgtgcaggtattaaagattctgggacaattctaccaggtcatggcggtattttggatcgaattgattcgctactttcagcgataccgatatttgcattgggtttttggctattattaaaacttggtatttttacagaagtttggataaaaatgtactttgcaaccatgcaagtgcctttttgatgagcttgattgattaataaggtttattaattatatttattaatcaaataaaaaatgtgattaaaataaatttaaggataataatggcagatacgcttcaatctttggcaatacttggtgcaacaggttctatcggtgatagtacactggcaattattcgtcagcatcccaatcgttatcgcattcatgcactgacaggattttctcgtgtcgataaattattggcattggcgatggaatttcaccctgtcaagatttgcacctcgcctgataattatgcacaattaagccaaaaagttactgatgcaggattggatactatcatactttcaggggatgaaggtttgattgagattgccagtgatgaagcggtagatacggtcgtggcagccattgttggtgcggcaggtctgtcgtctacattggctgcagcgggtgcaggcaaaagaattttattagccaataaagagtcacttgtgatggcaggtgatttggtcatcaaaactgccaaaaaacacggtgcaaccattttaccaattgattcagaacacaatgccatttaccagtgcttgcctgccgccattcaagcagataataccgccattcaccatacatcctatggtatcaaaaaactgtggctaacagcttctggtggcagctttttggataagtcaatcaaacaaatgcaaaatgccagtgtcaaagaagcggtaaatcaccccaattggtcaatgggtcaaaaaatctccattgattctgctacgatgatgaataaagggcttgagctgattgaagcttgtcatttatttgacctaaaagagcatcaaattcaagtggtgattcacccaaatagcgttgtacattctttggtggaatatgttgatggcagttttttggcacagttaggtacgcctgatatgaaaacgcccattgcacatgcattggcatatcctgagcgtatcaaatcaggcgtcatgcctttagacttgtatcagcttggcagtcttaaatttttggcaccagatttggataaatttgcctgcctaaaattagcacgatatgccgcaagattgggcacgggggcatgtattgcactaaataccgccaacgaaattgcggtagaggcttttttagcagaaaaaatttgcctcacagatattgctgtgattgttaaggcttgtctagatgataagacaattgcccaagattattcacaggattttggtgatgaagtgttagggcttgagcggatattgacgatggataaaaaggttcgtaagattgccacggctaagataaagttacttaaacaaggtgatgtgttatgacggcattatatatgtttcttgccgctgtttgtatactcgggcctttggttgctttacatgagtttgggcattatatcgttgctcgtttatgtggggttaaggtacaaacatattcaattggttttgggccaaaactgcttgcttggacttctaaacgctcaggtatacgctaccaaattgccgccattcctttgggtggctatgttaaaatgctggacagtcgtcaagaatctgtcgcagatgaattaaagtcagttgcgtttaatcatcagcaccctttaaaaaaaattgccatcgttgcagctggtcctgtcatgaattttttgattgccattgggctattttgggtgctatttttattgcccagtgagcagcttaacacccgaattggtgaaattattgacaattcacctgctgctaccagcggcttggtggttggtgataaaattatcagtatcgattcaaaatcagtcaatacttggcagcagaccgcctacgcattggcatctaaaatgggtgaaagtaccaccattcacattggtgtcaatcgtgatgggcaagtacttcaaaaaactgccaaggttttacattttatgcagaccaaagacagtcgtcagcctaatgatcctttaagtagtttgggtattttgccttatcaacccatcatctcacctgtggtcggcgaggtgctttctgacggtgctggtgcgttgatgggtctaaaaactggtgatgtcttcactgctattcatggtgaaccaatcaatgattggctaagtgccaccaagattattcaggcaaatccagaaaccatgcttgatgtgacagtcatgcgtcaaggtaagcaggttgatttaaaattaatgccccgtggtgtaaagacacaaaacggcgtagtcggtcaactgggtattcgcccccagattgatatcgatacgctcattcctgatgaatatcgtatgacgattcaatatgatgtcggtgaggcatttactcaagccatccgacgaacttatgatttatcaataatgaccttagatgcgatgggtaagatgattacaggattgattggcattgaaaatctatcaggtcccattgccattgccgatgtttctaagaccagttttgagttgggatttcaagaagtgttatcgacagccgcaatcatcagtttaagcttggcagtactgaatcttttacccattccagtgttagatggcgggcatttggtattttatacttatgaatggattatgggcaaatctatgaatgaagcggtgcagatggcagcatttaaagcgggtgcgttattgcttttttgtttcatgttacttgcaatcagtaacgatatcatgcgattttttggctaagttctgatttatcgtaccattaacaaaatttttggcttttttaagctgaaatacttgccaaatttaactttttggcttacctttacacaatataaatttgggtgtagaaaattttggatacatttttataccttatttttagaaattttaaaaattaagtttggatagacttatgcgtaattcatattttaaaggttttcaggtcagtgcaatgacaatggctgtcatgatggtaatgtcaactcatgcacaagcggcggattttatggcaaatgacattgccatcacaggactacagcgagtgaccattgaaagcttacaaagcgtgctgccgtttcgcttgggtcaagtggtgagcgaagcacagttggctgatggtgtcaaagcactttatgcaacaggcaatttttcagatgtgcaagtctatcatcaagaagggcgtatcatctatcaggtaaccgaaaggccgttaatcgctgagattaattttgagggcaatcgcttaattccaaaagaaggtctacaagaagggctaaaaaatgctggcttagctgtgggtcaaccactaaaacaagccacagtacagatgatcgaaaccgagcttaccaatcaatatatatcacaaggctattataataccgaaattactgtcaaacagacgatgcttgatggtaatcgtgttaagcttgatatgacctttgctgaaggtaaacctgcacgggtggttgatattaatatcattggcaatcagcattttagcgatgcagatttgattgatgtgcttgcgattaaggataataaaatcaatccactgtctaaagctgaccgttatactcaagaaaagctggtgaccagtttagagaatttgcgtgctaaatatctcaatgcagggtttgtgcgttttgagattaaagatgctaagcttaatattaatgaagataaaaaccgtatctttgttgagatttcattgcatgaaggtgagcaatatcgctttggacagacacagtttttgggtaatttaacttatactcaagcagaacttgaggcactgcttaaattcaaagcagaagaagggttttcacaagccatgcttgagcaaacaacaaacaatatcagtaccaaatttggtgacgatggctattattatgctcaaatccgtcctgtaacacgcattaatgatgaaagtcgtacggttgatgtggaatattatattgaccctgtacaccctgtctatgtacgccgtattaattttacaggtaactttaagacccaagatgaagtactccgtcgtgagatgcgacaacttgaaggtgcgttggcatctaatcaaaaaatccagctgtctcgtgcacgcttgatgcggactgggttttttaaacatgttaccgttgatactcgtccagtacccaactcacctgatcaggttgatgtaaattttgtggttgaagaacaaccttcaggatcatcaaccatcgcagcaggctactctcaaagtggtggtgtaacttttcaatttgatgtttctcaaaataactttatgggtacaggtaagcacgtcaatgcttcgttttctcgctctgagacccgtgaggtgtatagtttgggtatgaccaacccatactttaccgtaaatggcgtctcgcaaagcttgagtggctactatcgtaaaaccaagtatgataacaagaacattagtaattatgtacttgattcttatggtggctcattaagctatggatatccaattgatgaaaatcaacgcataagctttggtctgaatgctgacaataccaagcttcatggcggtcgttttatgggcattagtaatgtcaagcagctgatggcagatggtggcaaaattcaagtggataataatggcattcctgattttaagcatgattacacaacctacaatgccattttggggtggaattattcaagtctagatcgccctgtatttccaacccaaggcatgagtcattctgtagatttgacggttggttttggtgataaaactcatcaaaaagtggtttatcaaggcaatatctatcgcccatttatcaaaaaatcagtcttgcgtggatacgccaagttaggctatggcaataatttaccattttatgaaaatttctatgcaggcggctatggttcggttcgtggctatgatcaatcctctttgggtccacgctcacaagcctatttgacagctcgtcgtggtcaacaaaccacactaggagaggttgttggtggtaatgctttggcaactttcggcagtgagctgattttacctttgccatttaaaggtgattggatagatcaggtgcgtccagtgatattcattgagggcggtcaggtttttgatacaacaggtatggataaacaaaccattgatttaacccaatttaaagacccacaagcaacagctgaacaaaatgcaaaagcagccaatcgcccgctactaacccaagataaacagttgcgttatagtgctggtgttggtgcaacttggtatacgcccattggtcctttatctattagctatgccaagccattgaataaaaaacaaaatgatcagaccgatacggtacagttccagattggtagtgtcttttaatgccaagtcttcatgaaatgatgactgccatcgaaaaatatcagagcgtgcttaataaagatgatattgatggcagtattaagataacaggcgtggcaaatttatcggcagccaccaagcatcaagttgcttttttggcaaaagcaaaatatttggatgaactcaatcaaacaaacgcaggggttgtgttattatctgaacaattcatcaatgaagcacggacgattaaccctaagtgtttgtatgtattggtcaaagatgcttatttggcctatgcatgcgttagtacattattcaccccttcatgcgtgacaggcattcaccgcacggcaatcgttgcagattcagctgttattggtaatcaagttagtattggtgcaaacgccgtcattggtgaaaaagtggttttggctgatggcgttgtggtgggtgcaggtgtgattatcggtgagcgtacccaaatcggtgcaggcagtcaaattgatgctgctaccgttattcatcatgattgtatcattggcgagcaaacacgcattcatagccatgcaaacattggatcagaagggtttggttttgctcctgtggcaacgaaagatggacgacagtggcagcgtattgcacaactggggcgagtaattattggtaatcatgtgcgtattggtagccatacctgtattgatcgtggtgcggtggatgatactgtcattagtgatgatgtgattattgataatttggtacaaattgctcataatgttcacattggttgtggtacagccattgccgccaactgtggtattgcaggcagcaccaaaatcggtaaaaattgcctgattggtggtgcggtgggtatcagcgggcatttgacaatcactgatgatgttaccattaccagtatgagtatggtcattgcaaatatccaaaaatcaggaagttactcttctggtactgttgctatgccttctttaaagtggcggcgtgcagcagcaagatttcgtcaaatgggcgaaaaataacccaaagtttgattggttactaagctgggtgtgttcattttgttgattgattgaattgggtatgagtaaataaaaaataatcttttatccgtttattcataaggaaatttatgtctgtttcaaacattgattttgatttattagaggctgctgatattcaagcattaagtgatcgtggtgtcacattaccactacactataaccaaattaagcattatttgccgcatcgctatccattcatgctgattgaccgagtgaccgcttgtaaacccaatgagtggatcacaggatataaaaatatcagtattaatgaagagttatttaacggtcattttccagataatccaatcatgccaggcgtactacaagttgaagcaatggcacagctatcgggtattttaggtttcatcagtgcagggcagaccgctgatgatggttatctgtacttgtttgcaggtgtggataaagttcgttttaaaaaagtcgttacctcaggcgatcagctggttattcgctcaaaggttttgatgaataaacgagatatttataaatttgagtgtaccgcccatgttgatggtcaattaacttgcagtgctgaaattatgattgctcgccaaaaggtggatggcgtcaaatgattaacattttacaatcatttgagataaattttaagaggtaaccatgacgattcaccccacagcgattattgataaatctgcgatgatagcggattcggcgatcatcggtccttattgtatcgttggtaaaaatagccaaattggcgcacatacggtattacgcagtcatgttatcattggcgaaaacaccaaaattggtgtgcataatgatatttatcaatttgcaagtattggcgaaaacccacaagatctaaaatacgcaggcgagccgacttaccttgaaattggtgaccataatcgcattcgtgaagcttgtaccattcaccgaggtacggttcaagatcgtggtatcacacgcatcggtaatcaaaatctgctgatggttaatgtgcatatcgctcatgattgcgttgtgggtgatgacaatgttttggcgaataatgtgggcgttgctggccatgcacatattggtaatcatgtgattattggtggtcagtctggtgtgcatcagttttgtcgtatcgatgattatagtatggtaggcggtgcaagcttgattgtcaaagatgttgcggcgtatgttatggcatctggtaatcctgccaaagcacatggtctaaataaagagggtatgcgtcgaaaagggtggtcgaaagataccattaaagcacttgatgaagcgtatcggttggtatttcgttcagggttattgcgtgatgaagcgttagatgaactgacaaaactggttgaaaaagaaccaaaaattcaattactcattgattcaatcaacaacagtaagcgtggtttggttcgataaatcaaaaaaagacgaatatttattgatttttttattaacgatttagatgatgttaatttatttaaatcattgactgtatgtgtcaaacctgtaacgacttgttgcaggtttttttaatattgattatcagatttgtttgacttttttattaagttcatacaaactatggtcgtggtttttgattcaaagatggtttgataccatcggcttatcttaattgataggaataaaacacaacaataaaaaaggtgtggtgatttggattgatgagctttatgcgttcagattttatggaatcactgttataaaattagaaaaatcatttgcaatcgatgatgacaactcatcaaaagcggagataaattttaaggagagcttatatgtcggcgcaacgagaaagttggtcagcacgctctggctttattttggcagccattggatcggctgttggtttggggaatatttggcgttttccctatgtttcttatgaaaatggtggcggtgcattttttttaccctatttgattgctttggcaacagcaggatttcctttgttgtttttagactatgttatgggtcaaaaatataaaggtgcgccgccgacagcttaccgccgctttatcaaatcagcggaaggtattggctggtggcaagtagcagtttgtaccattatcggtatttattatgcgtctgttctaagctgggctggtaactacacgctatttgcagtgggtcagcaatggggtgaggataccgaaggtttttctttaatacctatctacaaaatgccagtgaattaaccatggcttattcatctcagctattgattggtttggtggttgtttgggtgatggtattattgattttatatggtggtatcaaaaagggtgttgagctatcaaataaaattttcattcctttattaatagtgatgtttggcgtattggttgctcgtgcggtaacgctaccaggcgcaacggtaggtttggataccttttttgcgcctaattgggaaaaaatggcagaccctaaggtttggttggctgcttatgggcatgtgtttttctcgatgtcaattggttttggtatcatggtgacttacgcatcttatctaaaacgcaatgccaatctaacggggtctggtttggtggttggttttgccaactcatcgtttgagcttttggcaggtattggcattttctctgttttgggatttatggcgcaggcatcaggcgtaccagtttctgaagtggtttcaggtggtattggtctggctttcatcgcattgccaaaaatcatctcaaccatgggcgatgctggcaacttggtaggtattttattttttggttctttatttattgctggcgtaacttcaatggtgtcaatcctacaagtgcccatttcagccgttcaggataaatttggctggtcaaaaaatcaatcagttactgtgataggtttaggttcagccatcatttcgattgcattatttggctctcaaaatgccattacatttgtggatgtgattgataattttgtgaataatattggtattgtttttggtgcgattttatctatcatttgggtaacttggtttaatcgcaataaactgcgtggattgattaatcatatcaatgccatctcaagtgtgaaagtgggtgcgatttggtcattcatgctgacgattgtaacgccgattgctttgattgttactttgggcttgacgcttaaatccttattaaccgaaggttatggcggttatccagctaatgtacagctcatctttggctggggagtgattattatctgtgcaattttggcactgatattaccacgaatcaacggccattcatctcatgaaaaataataaggagtttttataatgggaactttagcgttgacggtgatgataattgccatggtggcaatttggggtggtttgatcatctctgcactacatcttagcaaacaccctgatattgatatggacaaagtaccatctcatcattgattctgtatgaatctaacaaacacaccaagtcgctgatttggtgtgtttttatttgattgtttgtttttaaaaatggcttagcgtttagttatacatggtatttattgggaatattggctataataattcaagtttcacactgataacgcccatggatgggctatgttgattgatgtcatcaaaatataaagctgttttttgggagaatgacagcttttattatatttaggggactttggtatgattaccgagcatttggttgatatatcacgcctacagtttgcaacaacagcattatttcattttttatttgtgccattaacacttgggatgacttggcttttggtcatcatggaggctgtttatttaatcacaggtaaacaaatctggaaagatatgactcgtttttggggcaaattatttggaattaactttgtgcttggggttaccacaggcatcacaatggaatttcaatttggtaccaactgggcatattactcacattatgtgggcgatgtatttggtgcgccactggctattgaagggttgatggcattttttcttgaatctaccatggttgggctatttttctttggctgggataaaatgtcacggttacaacattttacaaccaccttattgatggctttgggtaccagcttatcggcattgtggattttggtggcaaatggttggatgcaaaaccctgtcggtgctgaatttaattatgacaccatgcgcatggagatggtcagttttgctgaaattttcttaaaccctgatgcccaaaataaatttgtacataccgtatcagcaggctatgtgacgggtgcgtcatttgttcttggtatttcagcatggtatttgctcaaagggcgtgatgttgctcttgcaaaaagaagctttcatgtcgccgctgcatttggttttgcggcaatatgcagcgccattgttttgggtgatgaatctggctactcaattgggcaagctcaacaaaccaaacttgcaaccatggaggcaatgtgggaaacagagccagcaccagcaggctttaatctcattgcagatatcaatgaagcagaacaaaaaaataactggtctttgcatatcccttatgtcatgggcgtgattggaactcggtcaatagatactgagattttgggtattcaagatattaaaaaactcaatgctgaccgtatcatcaatggtgtgactgctgttagtgcgcttgatttgatgcgtcaaaataagctaaatggtataaaaaatccgcaagcactgattgatatttttgaagaacataaaaaagatctgggttttgggctactgttaaaaaaatatacagatgatatggctaagattacgccacagatgctttcaaaagcggttgatgatagcataccaagggtaactccaatgttttggtcatttcgcctgatggtgggtatgggcgtattaatgcttatcttgtatgggctgtgtttattttttagtctaaaaggcagctttatccataaaccttggttgcttaaatttgccatgattatgattcctgcaccttggattgccatagaagcagggtggtttgtcgcagaatatggtcgtcagccatggacggtatatggcattttacccacgcatttatctgtttcaaacattgatgctgggcatgtgatattatctttggctgggtttgtacttttttatacaatactggggattgttgaagtatttttgatggtcaagtatgtacgccttggtcctgccagtcttggtacgggtagatatgatggtgaaaagacccaagtacatttgatttgcccatctgatgaacagggggtgtaatcatgttatatgacttatttgattatcagctattaaagctggtttggtggctgattgtgggtatactactcattggttttgccatcatggatgggcatgatattggcgtttgtacactgctaccgtttgtcggtcgtagtgatatcgagcgtcgcattattattaatacggtggcacctcattgggagggtaatcaggtttggtttgtgactgcagggggtgcaatttttgcagcactgcctttggtttatgcgacagcatttagtggctattactgggcgttgatcgctgcattgtgggcattattttttcgccctgtgggttttaaatatcgcagtatgataaaaaatgatcgttggcgtcatacttgggattggctattgtttattggttctgcagtacccgccttaatttttggcgtcacttttggaaacttattgcttggttcaccatttcattttgaccaaaatttagtatcaacttattcagggtcgtttattgaacttttaacaccttttgcacttttgtgtggcgtggtgagtgtggcaatgctgacgatgcaaggtggtgtatatttggcacaccgaactaccgaaagcatccaatcttatgcaaaaacagcaaccaatgttgcagcattggctacctcattgttatttgccatagcaggcttttgggtgcaatcactagatggctatttattagttggtgatattgatggcggtgcggttattgatcctttatcaaaacaagttcaaatccaatcaggtgcttggttgaccaatttttatgattatccttggctgtggctattacccgctttgggggttttgatgccagtgatggtgattatcttattaaaaatagaacgcactttgctggcttttattgcctcaagcttagcagttttgggcatcattgcgaccacaggggcagcattatttccattttatatgccatcttctaccgacccacgctcaagcttgacagtttgggatgcaacctcaagccattttactttgcttgtcatgctttttgttgttgttattttattgcctttggtattgacttataccagttgggcttatgcggtgatgcgtggtaaggttactaaagcctatattaaagaaaatgaaaaaacgctatattaagctgtatgaccataaaggcaattgatgtatttagccatcattgaactattagatttcatatgatataaaaaaggtaggttatgtggtattttgcttggattttaggactgggttttgcggtgcttctcgccgttgtcagtgcagtttgggttgaatttgaagacagtcgccgagatggttttaatcatccagacgacgaccaaaaataacattaacatcatcagtcaaagataaactaaattggcataattttggatttgatggcaggttagcaaaaattaagcaagataagcatgctataatttgctcaatttgatcaaaccaaccttaataaatcatcttcaactttcgttattttaggtgtcatatgtcagtactaaaaaattggatttattctatggctttgggcgtatccattgtcggtgcggtatcagttggcgtagccttaccagcgtctgccaatggtttggcatcgctatttggggataccagccagccaaagtttttgcctgttcatgaagcgtttaaggtttcatcatctcaagtgggtgatgaacttgtagtgaattttgttgttacaccgaagcattatgtgtatcaagaacgcttatcattgacactgcctgaaggagtgagttcagggtcgtggaaatttgataaaacacctaccatgattgatgatcccaattttggtattacgcctgtatttgaagaaaatgtcacagcaaaaattaagctatcaagccaaactggtattcaaaaacagcctgttcagattcgttggcagggctgtgcaaaagctgggctttgttatccacctgaaacgacgaccgttcaaatcagcctaaatgctcatgatgggcaagttgcatctgccagccaaactgcgaccaaacatgatagcgccaccactcaaatagcccctcacaatcaggatgcctcgtctcaaacagcagcatctgccatcactcaagatgaggcagttgttcaagattttgttaaacctgatgagcaatccttggcccaaacacaaacgccacctgtcgatgaaaatggtgaggctgataccaatcaagatgtacagataaatgcggtacaaaaaaaccgatttgcgcttgatcatacgctgcccacaatcagtgatgaacgcatatcaccaattttaacgattgggctattgtttttggcgggcatactgcttgcttttacgccttgtgtttatccgatgattccgattgtcgctaatattgttgccagacaacatgccaaatctgatgccaaacgaggttttgcgttatctttggcttatggcgtgggcgttgctagtgcttatggattgcttggggcgttgattgcttggtttggtcaagcacttggcattgcaacttggttgcagcgtgctgaggtcttgataggtgccgcacttttattcgcaatttttgctatatttatgttgggttggattaatattcgcctaccaagtgccatttccaatcagttatccttaaagtctcaagcagcagacaatcgactaggcaccatgggtggtagctacttatcaggtttattatctgctttggtggtgtcaccttgtgtttctgctccgatggcgggtgcgttgaccgttgttgctgcaagtggaaatgtcttttttgggtttgccgctttatttgcattaggaatggggatatcggcacctttggttttattaggtaccgcccaaggtaagtggatgccaaaatcaggtgcatggatgcagcatattcgtacattaggcggatttttactgtttggggtttcgttattattgattgagcgtgtgattttaaatacttggatgcttggtctgtggatgctttggtttattgcggttgctgcttggttgtacttgtcagttggtcgccatcagccactatttaagttattggctatcatacctatgatttgggcggctattttagcctatggcataaccatcggtgctaatgatgcttggcgtccgtggcacgcccaaagccaaagtttgtcagcttaccaagatattcatgccaaaacactcacagaacttgatagcgttcttgtcacccacgataaagtgcttgttgatgtaacggcagattggtgtattgaatgccgtattatggagcgtactttatttactgaccgcccagctgtgatgaatgattatcaggtggtgaagcttgatattacagaaacaactgatgatagccgtgcgattttatcgcgttatcaattatttggaccgcctgctttactgatttatcatcaaggtaagcttgagcgtgttttattgggtgaaacacaacctgaaacactcaagcaagcgttaatgccttaagtgatcgattattatctattttaaccataaaaagctcaattcgttgagctttttatggntattacaaccattaaagaaagagcatttatgactctttgggcgcactgcttgattaatcttaaaatctacttgcttcttgcccaaaattcaagcatgattgagtaacttagtgatgatttgttcacccaatcaccttagcatcggtcttgtttgaccgttaacactgactgattgatacagttaaatgaaaccttagtcatgataacaaaggagttgtttttatgcgttatgccaatccaaataccaaagacagtaaagtttcattcaaagaaaaatacgaaatttattgggggcaagtgggttgcacctgtagatggcgagtattttgaggatatttcacctgttgatggtaaaggctttgcaaaagtcgctaagtccaacaaaaagatgttgagctggcattggatgcagcagataaagccaaacaaacatggaataaatccacgccgagcgaacgatccaacttgcttttaaaaattgccaatcacttggaggaaaatttagaattattagcagtggcagaaacttgggaaaatggtaagccaattcgtgagacattggcggcagatattccattagcgattgatcattttagatattttgcaggatgtatccgtgcccaagagggcggtatttcacagattgatgaagataccgtcgcttatcattatcatgaaccaattggtgtggttgggcaaatcattccatggaattttccaattttaatggcggcatggaaaattgcacctgctttagcagctggtaattgcattgtattaaaacccgccgaacaaacaccagtgagtattttggtcttgattgaattgattgaagacttgttacctgcaggtattttaaatgtggtgaatggctatggacctgatgtgggagaactgctggcaaccaatccacgcattggtaaagttgcctttacagggtctaccgaagtgggtcaaaaaattatggaatacgccaccgaaaatatcattcctgcaacacttgagcttggtggtaaatcacctaatgtcttttttgctgatgtcatggataaagatgatgaattcttggataaagcactagaagggtttaccatgtttgctttaaatcaaggtgaggtatgtacttgcccatcacgcgctttggttcatgaaagtatcgctgaagaatttttgaaaaaagcggtcgagcgtgttaagaaaatcaaaacaggacatccactttataccgagacgatggttggggcacaggcttcccaagagcaacaagataagattttgggctatattgataagggtaagtctgaaggtgctaaaatgctgacaggcggtgaggtacgatatgatgtcgatggtggctattatattgaaccaactgtctttaagggcgaaaacagcatggaaattttccgagatgaaatttttggccctgtgttggcagtgacgacctttaaagattttgatgaagcgataaaaattgctaatgataccatgtatggtctgggtgctggtgtgtggacacgagatggctcaacggcttatcgagcgggtcgagcgattcaagcgggtcgagtatggacaaattgctatcatatttatccagcacacgcagctttcggtggctataaaaaatcaggcattgggcgtgaaaaccataagatgatgcttgagcattatcagcttaccaaaaatctattggtaagctgttcacccaaggcgatgggtctgttttaatgagtttagacgagtttggtgcaatgaatttgacctaccaatgggtgggtcaaattttgcttaaaacttaaagctaattcattaaaacttaattaaatccattgcatggtaatacaataaaagtcatcgggcattgatcaaacaataaccaaaatcataaaaaagtcccatgatatcgctatcatgggacttttgtttggtagatgaaaattagttttgttcttttttattgcgttcttcccagaaagtggcatttttgatacccagtttgatggggtcaaaagtaaacttagttacgccagctttttgttgagcttcatagtctttgagtgccaaaatagcaggcttagccataaagaagatcgccaaaataccgacaatattaagccatgcggttaaaccgacaccaacatcacccatattccaaatataacctgagttattgattgccccataagcaaccgcaaagataagcaccagtttgatgaaaaataaagcccctgttgttttaattgagcgtgtcaaatatgccacattaacttcagcaatataataataagccataatggtggtaaatgagaagaaaaataccgcaaccgccacaaaggtattaccaaaactaccaaaaatgctagaaacagccatctgtgtaaatgcaggtccgctgatgatggtggctgcatcaacattttgaaccaagaactgaccttctggcagtgtgccttgaatgttgtacatgccagtcattaaaatcataaaggcagtcgctgaacaaacaaatagggtatcaacatagaccgaaaaagcttgtaccatgccttgttgtgcagggtgttctacctctgctgcaccagcatggtgcggtcccgtaccttgacctgcttcgttggaatacacacctcgtttcacaccccagccaattgcagcccccaagcctgcttgtgctgtaaaggcatcaccaacgattagactgatgatattaggcagttggttgatattaaataaaacaatcagcacggccatcaaaatatagcccaatgccattaaaggtacaacaaattcagccacacgagcgatacgcttaataccaccaaaaatgattaagcctaaaataagaaccatgaccaaggttaccaccagggtatttgtaccaaccgcaccaaatgcagtatttaccatagtgccttcacctgtgatgcccgtgatggctttaacaacaccatttgactgaacgcctggtaagaataatccacaagagatgatgaatgaaatggcgactaaaataccataaaatttaccaaacccaccaccaaagaacttttcaaagtagtaagcaggaccaccacggtactgaccacggtcgttttctttataaatctgagctaaggtagattcggtatatgcagtagcagcacccaaaaaggcaaccacccacatccaaaatacagccccagggccaccaaaaccaatcgcagcggcaacacctgcaatattacccatgccaactcggccagataaagagacggtcagcgcttgaaatgagctgatgccttcaggtgattgattgccagaaaaaagcaggcggatcatttctttaaaatgacgcagttgcacaaagcgagtcaagatagaataaaatagcccagctgccaagcacaggtaaatcagtgcagggctccaaataatcccatttagggtatcaatcatgcttttcataagcatattcctttatttatcccaagcattttaccattgggagattagaccacaattatgctatcaatccatcacaatctaggatgttggttaatagatagccaatccatttacctaagagatacaaaaatgccatattttaccaatgacatgaaacatattgtcttagataattgcaatttgccataaaattttgagaaaagccagtaaaaattatacttttttataaaaaatttcatcaaacacatgattttatggttaatgtataaatttttttatgcatttaaggtgttgttaacagagtattttacccatatctactcaaaagatgctaaattttagacattaaatttacaagcatctttatgattaaaaaaaatgactgtataatcatagcaatataaaaaatgggattcttaaaatgattatgaaaaaacatctgttcatcagtgtaatacttgccttgacattaagtttgtcgggttgcggttataacgcactgcaagcccaagatgagcaaacagctgccgcttggtctgaagtggttaaccaataccaacgcagagctgatttggtacccaatttggtacaggttgttgagcgttatgctaatcatgagcaggccgtatttagcgaagttgctgaagctcgggcccgtgtgggtagtgtgcagctgacgcctgaagcattgaacgacccccaagccatgcagcgatatcaagacgctcaaggtcagatgacctcagcactgtctcgcttgatgatggtatcagaacgctatcctgagcttaaggcagatgcattattccaagacttacaagtacagcttgagggtaccgaaaatcgcatcacggttgcacgcaatcactacattgaagatgtccgtacctataatacaactgtacgccaatttccaaccaatttgacggcgatggtatttggtatgaagcctaagcctaattttagtgttgaaaatgaagcggcgatctcagtggcacccacggttaattttggcaataataccaatactggcactgcacagtaattgactttgtgtggttaaggtaatgcaaaaaatgcacgctcatactcaagcgatacagcgatgggtgatggcgattttactaccaattttattaatttttggtgagaccgcttgggcttctgagtctgtatctgaagatgatttgacagcactgattatcagtgctaatcgtgcgtcccaaagtaatccaaattcaccactggcagaatctgtgcgtgaatttgagcaggctattaatcccgccaatcaagtagataccaaaccccaatcaacccccatcaatataccaacatctcacgcacaaagtatcagccatgacaagctgattttaaatacacctgtggttgatgttgccaaaatattgacaccatcagaatatctacacttaaccgaacagctccataagatttatcaagataatttggctcaagctgctttggtgattgttccaagtactgatggtatcgatatttttgattatgcacttgccgtcgctgagcgatggcagttaggtcaagcagatacagatgatggtttattaattactgttgcggtgaatgaccgaaagatatatatcctaacaggttatggacttgagggtgtgctgcctgatgcagcattaagtcgtattattcgtgatgatatcacacctgcttttaaatcaggcaattatgctcaagggctgtcagcagggattgcacgcattgatgaacgcctaagagctgatcctgaaagtttggctcgtgctgacgctcagactgatgattctgtggatatagacatcattggcttatttatcattgcgttgattgcaggttcttttttgggggcgattcttggtagatttttgggtgcaacctttggtgcaggtggatttgttattgtggcactgatgagtggtgctggattttttgtggtaatgatcgctgcagtcatattatgggtatttttattggctcgtggtgtcttaccgatcacaggtggtagcggtaactttggtagcggtgggcgaagtggcggttttggtagcggtggctttggtggcggtggcggcagcttcggtggtggcggtgcaggaggttcttggtaatgcagacaattcaatcaaccaaaagtttggctcggctgtttcgtcagatggtttatattccctcactgcataatcgctggctgactaaaactgtcaagaccacattgacacaagcgattacacaggcggagctgggtcatcgtggggagatttacctgattattgaaaatcacttgcctattaccaatgcctatagccaagattgtcgtgagcgtgccttatatttgtttgcaacgcacaaggtttgggatacagagcataattctggcgtgcttgtgtatgtcaatttgtgtgagcataatcttgagattattgctgatcgtggtattgatcaaaaggcacatatggatgattggcaaaatatgtgtgatgatgcggtagctcaatttcgccaaggcaagatgcaaataggtttgacaacgctcatcactcagcttggtaaattattaaaactgcattatccaagtagtgatgagatgggtaatgagctgtccaatcaagtcacttatcttaggtaggttagcattggtttaaaatatgtcattggttattcatttttaaccatcaatggaaataatagcaaatctatttgataggaaaatagcttatagatgacaatcattaaaaaagcaaatgtcatcaaaaaataactattgatatatgcaccaacagacataacaatcatcaagacaatcattagatatgcagaaaaaaatactggcgtttgtatggcttctttgcaacaagggcatttgccagaatattctaggacatcaatgcattttttatgacagttagggcattttttcataatgtatttaactattttttaagccatggtttggttgcaataaccttcttcttgcatcaaaaaagtatactaataaaattctatttatttttcaatacattggcaatcaaaaaacagataaatatcagcgttgatgataaaaaacccaaccctaaggtaaataatattagatttacacttgaattggcaaaaaactcttcaatgcaaatggctaaaaatatcaaaaaaccaaaaattaatgaaatgatgaattgcttttttagattttgtttttgcaatgtcatcacccacacaagataacaaaccagataataagtcaaacataaaactcacctaaaattgtaaattatgatggatagccgcactggtgaggatggttactgttgtgaacgataactggtgtttgtcaagtgttttatgccagaatatatcatatggcaaccatacccatcaagaatgtgagttggctctagactagcagaaacaatctgatagactagaaacatgagatacaacagtaagttaagcaaatacaaagtcaaaaaaatcatacaatgcttctgcattgacatagatgcgaccaagactgctcaactattaagcctaaatcgtaacacaatcaaccgctggtatggtatctttagacaagttatctatgaataccaaatggggcaaaaaaatcaactctacggctctattgaagtcgatgaaagctactttggagcgaaacgccaaagaggctatcatggtaaactcaaacgaggtcgtggcacattaaaacaacctgtatttgaaatctttgaacgagatggtagggtttataccgaaatcgttccagattgcacagctaaatcgctacaagccattatcttgggtaaagtatcacctgatagtgttatctattcagatgggtggcgtggctataatggcttggttgatgtgggttatgccaaacactttcgggtaaatcatagcaaaaatgagtttgctcatggtaagtgtcatatcaacggtattgaatccttttggagttttaccaaaagaaggtttgcaaaatttaacagtgtaagcaaaaatttcgaatggcatttgaaagaatgtgaatggcgctggaagcagaatattgatgatttagaaaaacatctatggttgcttctgcaataaattataccaatcactctgctaggctctgttgacatacattgaattgatggcatgctattgatatgaacagattaatgctaagtgatgcccaatgggccaagatagagccgctttgtgccggtaaagtcacagatgacggaagaagcgcaaaagataaccgattgtttatcgaagcagtgttgtggattattcgtacaggcagtccctggcgtgatttacctgaagaattcggtaagtggaacagcgtgttccaacgctatcgcagatgggtcaaggctgagcgttttgccgtaatctttgaagcactgcggggagatcctgatatggaatacgctatgattgacggcaccattgttaaagtccaccgccacggacaaggtacaaaagggggactttaaatcaggctattggtaaatcaaaaagtggcatgagtaccaaaatcttggctttggtcgacgcattgggcaatttggtttcattcaccctattacccggacaacgtcatgacattgtcggtgtcgaagcgctaattaaagacaaagagtttaatgctttactggcagacaaaacctttgatgcagattggctgttagaggaactgaacgaaagggcttgccaagcggtgattccaccaaggcaagcacgccaagcgtggcaagggtgaatttaaggattttttcaataaaggtttcattgtggattaaataaatcaaaccattaggatttgggtgtcctaatggtttttttggcttaggttgcaagtacattattatggcaaatttgggttattttggaaaattgagtgttgttatggatgggtataaggtgggggtaataatgggaaaacttacttataagaatactctaaaaatgatatactaacgccatctttcaaataggatatttattatgccaaacgctcaagccatcaaccaagactttttaaataaacttgaccaagacctatggaaagccgccgacaccctacgcaaaaacctagacgcggccaattataaacacatcgttctgggttttatctttttaaaatacatctccgatacgttcaccgattttcaaggcaaattaaaagccaatatcgccaaccccgagagtgatatttatcttgacccatcactgtttgagccaagcgaatttgaacaaatcctgtctgccgaactagaagaacgggattattacaccgccgaaaacatcttttgggtgcctacccaagcacgctgggaaaacatcaaagacaacagcaaactaaacgcaggcgatgaattgccttggggtggcaaattcaaaaatgtcagcattttgcttgatgatgcctttgaagccatcgaacaagaaaaccccaaactaaaaggcgtgctccaacgcattgcaggctttggcgtgcctgatgaaatgcttcgtggcttgactgaccttttctctcgcaccgactttacccgcccaatgtacaatggcgaacctgtgcatctgcaagccaaagacattttgggtcatgtttatgaatatttcttaggacaatttgccctagccgaaggcaaaaaaggtggtcaatatttcacgccaaaatccattgttaccctgattgtggaaatgctcgaaccctattcagggcgagtgtatgaccctgcgatgggcagtggcggattttttgtgcaaaccgaccgatttatccaagcccaccaaggtaaccgcaacgccatttcggtctatgggcaagaatccaaccccaccacccgcaaactggcggtgatgaatatggcgattcgtggcattccctttgactttggcgacaagcctgaagatactctgctcaatccgttacatattgataaaaaaatggattttgtgatggcaaatcccccttttaatatgaaagaatggtggagcgaaagtttggcaggcgacccacgctgggcatacggcacaccgccgcaaggcaacgccaactttgcgtggttgcagcatatgatttaccacctttcgccaaaaggcaaaatggcactcctacttgccaacggctcaatgagtagccaaacctcaggcgaaggcgaaatccgcaaaaacatcataacagccgacctagtcgaagcgatgattgccctgcccaatcagctatttaccaacacgcaaatccctgcctgcatttggattatcaataaagccaaagctcgtaaaggcgaagtgttgtttatcaatgccacccaaatcggctatatgaaagaccgtgtcttgcgtgattttaccgttgatgacatcgccaaaatcagcgacacctaccacaactggcaaaaacaggacggctacgaaaatatccctgcgttttgttactcggcaacactggacgaaatcgccaaaaatgactttgtgctgacggctgggcgatatgtgggagcagtaaccgaagaagatgacggcgtaccgtttagcgacaaaatgcaggaattgaccgcttgtttaaatgaacaatttaaacaggagcgggaattggaacagcaaattacagagaatttgaaggggttggggttttaaaatgagtgatacacaaaccagattagatgagattgcagaattaaatccaacccgtgcattgaaaaaaggaaaaatgacttcttttgttgaaatggcttcactaccaacaaattcacgagatattgagaatatcgcacaaaaagaattttcaggtagtggaagtaaattcaaaaatggagatattttatttgcccgaattacaccctgcttggaaaatggaaaaacagccaaagtagcaggactccaacacgatgaaattgctcacggctcaactgaatttattgttctttcagccagagaacctgaatttgacgaagattatctgtattatttttgccgattatctgaatttagaaactatgcaaaatcaagaatggaagggacatctggaagacagcgtgtctcttggcaagcattggcagaatttgaatttgactttcctgataaagaaatcagaaaaaaagctgctgatatgctgaaaatttttgacgacaaaatccaactcaacacccaaaccaaccaaaccctagaagccatagcacaggcaatcttcaaaagctggtttgtggattttgaccctgtgcgcgccaaagcagccgccctaagcgaaggcaaaagcgaatacgaagccaatcttgcggcaatgtcggtgatttgtggcaaagacaccagcgagttaaacgacaccgaatacaaagcgctttggcaaatcgccgaagccttcccaagtgaattggtggaaaatatagaatttggcgaagtgccgaaggggtgggaaaataccacattatcagagatttgttcaatgcaaaatggttatgctttcaaaagcaatgaatggacaggcagtggcattccagtcattaaaattggttctgtaaaaccaatgatagttgatattgaaagtaatggatttgtttcagaagagaatgaacatatacgttctgattttctccttaaacaaggagatattgttgtcggattaaccggatatgtaggtgaagtcggaagaattccagcaggcgacaaagctatgttaaatcaacgggtagccaaatttgttcctaaaaaattagaccatgaattaagctattataattttgtttattgcctagcaagacaaagaacatttaaagaatatgcggaattaaacgccaaaggttctgcacaagcaaacattagcacacgagaattacttaattaccctatttgtttggctagtctagaagttcataaattttttgagataaaaataaacgaacttctttataaaatattaaccaatagtcaggaatcaaaagtattagaaaaaactcgagacctactcttacccaaattattaagtggagggttatccaatgaataacgaagaattatcttctagttactttgatgaaatcaaagaatggcaaagtggcgaacctatttttgtctctaaaaacgatgagataaatagtcgtatccctttattaagagtaaatggctggaaaaagtttattgatttactttctacaaattttttccaagaaaatatttctgaactcatttttagagggcaacgccgatatgattggggactaatgcctaatattgccagaaatagtgataacggcttgtttactaaagaattgatggaaaatcagcttaataactttaaaaaagccattcgcggtcggattaaagattatactttattgcttaatgaagatgatgatgaaatttgggcaattgggcaacattatggattgaatacacctttattggattggacatattctccttatgtctcattattttttgctttttcacgcaaagatgttaaagctgaaaagccaaatgaataccgagttgtttatattgcaaataagaagttactttctaactttgttacctttgttgaccccaaagtggatatgtatgggagattggtcaatcaagcaggtttatttattaaagcagaagcaggaaaatcgatagaatctttaattgtagattctattgcggagcagaacggaagtgaatttctctctgatgagtcattcgaacaagaaatagcaaaatatctctgcaaaatttatattttaaacacaccagacattcaaagtgattgcattttatctttgcgacaaatgaatattcatcacgccaatttatttcctgatttaatgggggcagctgactattgcaatctactttctgagtttcaaccagataacaaaaacccaaaaattcttgatagttcaacgctaaatcattgtgaatctccaactcttgcaaataacgaaggcagtatccttactcttacaaacaatagctctattaataatattaaggaattattaataccttatctagctcttcctgatacagacctagaacaaatagccaataagttactcaatattctaaaaaccaatatggtaactgactggcaaacacgagatgaaattaaagcaaaaatcaaaattgcatggcgtagaatcctatctcaaaccaacatgaataaagaacaaatagaaaatatgttagatgaattattcacattagattttcagccataaacattattttcacggagaatccataatgctaggcatcaacgaaaacaccatcgaacaatccgccattgccacaatgcaatctttgggctgggattatgcctacggcaaaaccattcttttgggctgccaaaatgaatggcgagaacggacaggcgaagtgattttaaagcccttgttggcggccgccattgcaaaattaaaccccaatttgcctgctgccgaggtggaaaatgtggtggcgatggtttgccgtgccgacactggcgaccttgccgagcgtaaccgcggggcctatgaatggctaagaaatggcgtgccgtatcgttatcaggcacagggtgagcaaaagtttgaagtggtgcgtttggtggattttggggtgcctgcccacaatgattttcgcattgtcaatcagctggatattggcggtaaaaaaggcaaacgcattccggatttgattggctttgttaatggcttgccactggtggtgtttgagctcaaaaatccactcaaagaaaatgccgatattggcaaagcgtttgcccaactgcaaacctataaagatgaaatttccgatttgtttgtgtttaatcaggcgttggtgatttcagacggtattgtcgcccgtatcggttcgctgacggctgattttgagcgtttcaccccttggcgtgtggttgatgagaaaaacaaaagccaacggattgtgtttgaaaatgagctagaaggcttgttacaaggcttgatgacgccaaaaaatctcttggattatgtacaaaattttgtggtgtttgaacgagacaacaaaaaccgcaccattaagaaaatcggggcgtatcatcaattttatggcgtgaatgaagcggtggaatgcaccctacttgccagcagtcatacaggcaaccgcaaagtaggcgtgttttggcatacgcaaggttcgggcaaatcgctttcaatgctgttttatgcaggcaaggtattaagtcaaggcagcctgaaaaatccgactttggttttggtcaccgaccgcaacgatttagacggtcagctttatgctaccttttgcggtggtgaggcattgctcaaacaaactccagtccaagtcgatgggcgagatgaacttcgctctgctcttgccagtcgttcggctgggggcgtgatttttaccaccattcaaaaatttggtttgatggaagatgagctaagccacccaattttgaacgagcggcaaaacatcattgtcattaccgatgaagcccaccgttcgcaatatggttttagccaaaaaatcaacgacaaaggacaataccgagagggttacgccaagcatttacgcagtgccctgcccaatgcgtcctttattggttttacaggcacgccaatcgcccttgatgacaaagacacccaagaagtgtttggtaaatatgtgtctatttacgattttgaagatgcggtgaaagatggagcaaccgtgccgattatctatgagccacgccaaatcagcttgggcgaaagtcatgattttgacaaggtggtcaaagaagctcaaaccctgcttgatgatgatgaacaaaatccgacttttcgtttgcgtgaaaaattgcacggtgttgaaagccgtttgcaaaaaatggcggaagacatcattgcccattatgatgagcgtaccaaacagcaagacggcaaggcgatggtcgtggtgatgagccgtgccatttgtgtgaaattgtacgaaaaaatcattgcaattcgccccgattggcattctgacgatgtgttgcaaggagtgataaaaatcgtgatgacaagcaatgccagcgaccctgccgaatggcaaaaatacaatcaggacaaaaaacgctggaaaaacgctttaaagacccagacgaccccctaaaaatcgtcatcgtgcgagatatgtggctcacagggtttgatgccccttgttgtaacacgatgtacattgacaagccgatgagtggacataacctgatgcaggcgattgctcgggtcaatcgggtgttccgtaacaaaagcatggacaatggcggtttgattgtcgattatgtgggcttgaccgatgagcttgaaaaagcgatgaagcaatataccaacgcttgtggcaaagaaaaacctgtacgcaatattgagacggttttggaaaaaatgctcgaatatgtcagcattattcgggggcaatttgccacacctgtggatggacaaacggttgatattggcaaaattttgcaaattagcgaacctgccaaattgctgaatgcgattttgacctctgccaaccatattttagccctagaccgaatcaatcctgatgacagcaaagacaaaaagggcaaaaccccacgcaaaaatgcttttttgcaagcggtacggtttgccaaaaaaggttatgccctttgcggtgcgttaaaagcggttgaaccttacaaacaggaactggctttttatgatgcggtgcgtgccaccatcatcaaaacagcactgcctctcgcaatccttcgggcaaagaccgcttgttacagctaaccgtcttgatgaaccgtgcggtgcagtcggacggtgtggtggatttatttgatttattaaaaaaagaacgcccaaacatcaatctactttctgatgaatttttggaaacggtaaaaaacagcccaaccaaagatttatggattggtgcgatggagcgttatctggcgtccgagttgcgcacacaaagcggggcaaatcttgccaccaaaaaagagtttgagcaacgactcaaagaagcaatgaaccaataccataaccacaatttatccgtgttggaaattttggaagaactcatcacgcttgccaaagagtttgacgctcgccaaaaacgaggggaagagctgggattaagtcctgctgaaatggcgttttatgatgcattggctcgcaacgaaagtgcggtgcgagaaatgggtgatgcggttcttttgaaattggcacgagaaatcaccgaaaaactgcgtaaatcggtaacgattgattggcaatataaagacttggtgcgtgccaaaatgcgaacgctgattcgtattaccctacgcacctataaatatccgcctgatttacagaatgaagcgattgaatttgtattgaaacaggcggaggagattgcggaggatttggtaccgaaagaaacggcttgatgcttaattcgtaaaataaacccctacgcccatcaagaggtaggggtttattttttatgctttaaggcttgccatatcaatcacaaaacgatatttcacatcgcttttttgcatatgctcataggcggtgttgatgtcttgcatatttatcatctccacatctggcacgatattatactcggcacaaaaatccaacatttcttgggtctcacgaattccgctaatcatggaggcagaaatgctacggcgacccataatcatcggcacggtgttaatggtttgttccagctcgcccatcagaccgaccagtaccagcgtaccgtccaaggcaagtgtcggcacataaggctttaaatcgtgggcgtatggcacggtgtcaatgatgacatcaaaggtgttcgccacctcgaacatctgattttcatcggtggacagcaccacacggctcgcccccaagcagtaagcgtcatcggatttgccaagcgaacgggtaaagagcgtaacttccgcccccatagcatgagcaagtttgaccaccatatatcccagtccgcccagtccgaccacgcccactttggtgcctttgccgactttccaatgacgcaggggcgagtatgtggtaatgcctgcacacagtagcggggcgaccgcttgggtgtctaggttttcggatacttttaacacaaaatcttcgctcaccacgatagacgtgctgtaagcgccttgggtcagcgtgccgtcatgacggtcaagactaccgtaagtgctatattgccgtgttcgcagtattgctccaaaccgtatgaacatggcgagcaggtacggcaagaatccaccatacagcccacgcccaccaagtcgcctaccttaaatttttgggcgttgtcgccgactttggcaatgcgtccgatgatttcgtgaatttatgtttttaataaatattttgttgagagaatgtgtttattccacaaacttcacaacttgctcaaaagtcttgcgtgctttgggcttaatctctttatcacgatagccaaatgttaccatgaccgacaccgcccactcatttgggtcaaataagccttcatctgccaaaagctggttcacttccttataagcaaaaccttcaatcggacaagagtccaccccaatcatggcagcccctgtcatcatattggcaagtgcgatgtaggtttgtttgcttgcccagtcatatagactgcgttcgctgtctaagatggcgatgtcttgttcttggaatttttggtacacctccaatgctttggtacggtcatcacccataagccctcgtctgtccatgatttcaccgaaataaggcgtgtcataacgggcatttttcttggcaagtatggcaacaatgtggcttgatgtttccatggtcggaatgccccagcagtaaggctttaacttttggcgtaaatcggcattttgtaacaccaaaaattgccaaggttcagaccctaccgaacttgggcttagacgacccaactccaaaatatagttaaagtcctcagcagggatttttttatcgccatcatatgagcgagtagacgcacgataatgaaaggcgtttaaaacgtcatctttgttaaaaaattgcatggtaagctccaaaataatgaatgattatgacaatgtatctaaacacgatttaagcatgattaaacagcccaaatcgcccaaaaataccgttcattgctaaaaatttacataaacccacgctcatattgtctgggcacaaactgcacctctttgccatctgagcggttttgctgatactgggcgtttagcacccaatatgggtctcgaagcagcccacgacctatcgccacaaggtcggcatcgcccacgccaagcacatggtcagccacggcagggtcatccagcatgcccacagcaatcacaggtttgcctgtggcgtgtttgactttgcgagccattggcacctgatagcctgcataaaactcagggtgcttgccctcacacaatacgccatcgccgccgccactgacatgaaacacatctgccccagctgttgagaagcgtttggcaatctccacaccataatcgctgtcaaagccgttttcgccatactcttgggcagagatacgcatgattaggggcatctcatcaggcatgacggcacgaacagctttaatgacttgctcgccaaacaataggcggtcttgtccgtattcatcgcttcgttggttggatttgggtgcacaaaactggtgaatcaaatagccgtgggcggcgtgaagctcaatcgcatcaaagcctgcattcaccgctcttttgacagagtcggcaaatgctcgcaccaatgcttttatctcgtcaatgctcagctgccttggggtgatgagattttgcccagcatagtcaagctcaccatagtgaatggcacttggggcaacggcatttggctcatcttgggctttacgacctgcatgggcgatttgaatgccaattttcgccccttgtgcatgcacgctgtccaccaattttttaaacgcttgttcttgctcatcattccaaagccccaaacagttcgccgtaatgcgaccattggcagcgacattggtcatctcaacgataatgaggcccacaccgcccaccgctcggctggtgtaatggagcaaatgccagtcatttggcacaccatccgtagcagaatattggcacattgggggcatgacaatgcggtttttgagttcaaggttttttaggctgatggggtttaggattttgcgaaaagttgccatgattgtcctattgttttagatactcattattttgatgctaagtttttgatactaagtgatttggatactaaattttagatgctgatattttaaaaaaattgtgttatcatttcaaattgattattttaatatgtgcttatcaatatggctgatatcaccactcacattttccgaccagataacattaacataacactgacagacaacattgatgaacagcattgatatttttaaaaaacactaagcgtgtgatatgaccgatatccgaaccctagacctaaacctattaaaagcctttgttgtcttgctggacgaatgcaacgtcagccgttcagcacagcgactgtccatcacccaacctgcgatgagcggtattttaaatcgcctgcgagagagttttaatgacccgttatttgtgcgggttcagcacggcatgcagcccaccgatagggccattgagcttgggcatgtcgctcggcgtgtcttagaagagataagcggcatgcttgccccgcctaaactagaacctgccaatttgtccatgaccttacgcattggggcgatggattatgtacagcaaatcatcgctttgcccttgattttaaggctaagacggcttgctccgaatgtcaaagttgccttattgcctgtgcaagggcaaaacatcaagactttgtttgataaaaacgccattgatttggcactggttgggcaacatcacatcagtgatgacatgcctcaaatgcgattatatgaagagcattatgtttgtgtgatgagtaaaatgcaccccatggcgaacaccgctttaacgcttgatgaattttgcaaattgccctttgccatgctctcttataatggcggtgaatttcgtggtgcaactgacattgccttacaaaagttggggcgaaaacgcaaagtgatggtgtcggtagaccatatctcgctgctgccacagctgttgagcaattcagatttggtggcggtattgcccaagcaccttgcccaaagattgccaaatgtccatctacaaaatccacccatcgccattgatggttttaccatcatgatgacatggcacgaacgcaccgaacaagacatggctcatcgctggcttaggagcattgtgcttgatgtgatgaaatctgataaaggggtcagccgatggtgattttttaagtttaatatcatgttatcaacaaagttttcaaaattatcttgtttttcttggtataattttatataataccgccttattttatatccttgtcgtgttcgttatcaagagtcatcaaagggatgaccacggcacacaggttttatctggagagataaagatgtacgcagtcattaaaagtggcggtaaacagcaccgtgttagcgttggcgaaacgctaaaagtagagctattaaaagccgaaaaaggcgaaacgctaaagattgaagaagtgttgatggttgttgatggtgctgagattaaaattggctcgcctgtagttactggtgcaagtgtagaagctgaagtggttgagcatggtcgtggtaaaaaagtacgcatcgttaagcatcgtcgccgtaagcactatcacaaagagcaaggccatcgtcaatggtttaccgagctaaaaattaaagccattaacgcttaattcaccacattagtatttgatactttagggcattgcccatggtattttaacaggagatattttcatggcacataaaaaagccgcaggttctactcgtaacggtcgtgattctaacccaaaaatgcttggcgtaaaagtttttggtggtcaagatgttgttgctggtaacatcatcgttcgccagcgtggtaccgaattccacgcaggtgaaggtgttggtatgggtcgtgaccatacattatttgcattaactgaaggtgtggttaaatttgagaccaaaggtcaatttaaccgtcgctatgtttctgttttagcaaaataatcagcatattgcctacagattaaaatatttcagtctgtcgtagcatagccacatataaagctcatcgtgtcatatgatgggctttttattattttattatattctctgttagattaaaccaaccgctggattgattcagattggttcagccaaattgacatgcttaatgccaataaaaaagccttgtccaaaaacaaagctttttagtgactttcatcaatggttgtcataggagtggatgaattatttttcaatccattggcgaattttctcacgctcttcatcgctggcgtttagccaaatttgcataaagccatctaagttgtcatcagcacgcaccgcatgattgtcagtgggtttggcggtattgtaagtactgattgcagcaatcgcctcttggttggcagttgttgccgaatttgtacgaccaaataggttgttaatcgtacttgtaataccgtcaaattaacctgaacgctttgtttgaatggtatcttcttgggtaataattgcaccgtgttgtgtgatggcttaactgggtggtttgatata

SEQ ID NO: 38 - DNA, 94750 bp, Moraxella catarrhalis
ggtttagaacctcgtgagacagttcgtcacctatataccgtggcggtggaaatttgagaggatctgctcctagtacgagaggaccagagtggacgaccgtctggtgtttcggttgtcacgccagtggcattgccgagtagctatgttcggatgggataaccgctgaaagcatctaagcgggaagcccaccttaagataagatttccctaaagagccgttgtagacgacgacgttgataggttgggtgtggaagtgtagtgatacatgtagctaaccaatactaattgctcgtttggcttgaccatacaacacccaagtggtttaccactgactgtgttgattggtaatatgtaagatgaaccttaatcttgatttggtaataaacagactcatacagcgttgttaatccttttacgctgacgacaatagcaagatggaaccacctgatcccttcccgaactcagaagtgaaacgtcttagcgccgatggtagtgtggttcgcccatgtgagagtaggtcatcgtcagcaccttattttaaacccctctttgcagaagcaaaggggggttttgtttgggggttgattaagtccagtttagcgcttttaaaatttttttcaatgccatcttgatcatggcgtgggcaaataatatgagcatgttgttttaacatgggatgtgcgttacccatagcgatggccgctcccaccaacttaaacatttccatatcatttaagtcatctccaaaagctaccgcccctgatttggagatatttagctgatttaatagtcttgctattgagcgtgcttttgaactttgataatccaatacatctacagcgtaccgatgccaacgagttgttttaatgtcaggtggtagaatgattttctcggcttcatgatcttcataaaatgctaagatttgataaatgggttgatgaaaatcaaaagtttctttattagctggttgtggtgtgatgtccaatgcacctaaagcagttttcaaattgtgattctgattgaaacaaaagatttcagcccttgtcataaatgcagtggcaatgttatgatgctcaaatacttctaatatctttttaacttgctgatattgcaatggaaaatcgaataattttttaccagcgaattcattgtattgaccattcatggttaataggtagtcaataccaacctcatcaatcagcttgcgtacttcgatgggtataatcccaagtgcgacctgtggcaattgcaagcagtacaccttgattttttagagcgagtaaagcaggtttgacactctgcaggatgcgttgttcgtctttgatatataaagtatcatcaatatcaaggaaaataattttaggtaaagaataagacttacttagcatgagtaccccaaaattttttgatgcgtttataactgacaaataaaataataagcccagcacctatgatgatataatggctgatggtactgacatagttggctactttatggtagttagctcctaatacaaagcctgcgtatgccaaaatcgcactccaaattaaggaacccaatccagttaatatcaaaaaaggcaataagggcatgtgtgccatacctgctggaatggatatcagtgagcgtatcgcagggatcattcgtccaaaaaatatgacagatttaccgtgccgatcgaaccatttttgggcattgcttacatcattggcggtaatcaaaaaatacttaccatagcgatttgtcaaatgtatcaaacgcgctttgtctagctttgtaccgatataatataaaggtagggcaccaatgattgagccaattgtgccagcaatgatgacggcaaataaattcatctgacctgtggctgcagcaaatccagcagcgggcataataagctctgatgggatgggtggaaatatattttctaaaaacatcattaaactgacaccaaccaaatctagcttgtccatgatgaccaaaacccactcactcacttgttccatagtactcgttcacaaatattaaaatatttaaattttaacattttttccatgatgatgttgttgggttgtgcaataaagggttgcttgatttgtgtgtattctttgcttatttgcttttttgtaaaaaattgtaactatatgtaatatcatgagatttttaggatatttttgaatttattactttcacttatcgataaaatgcgttaacatacgctaatttatctcaatatgactctatcaacgatcgtatatattcaaaagcattattaccaccaaaaatctgatcgtcataattgtctataaggcattaatagaatattcaaaaattcattgatgataaaaatttaataatcaatggcgtaatttgtgactaaaatctctatgaagacaatgactgtaaagccatggcattctgcattgatgataattgtattgattgcaatttttgggttgttgaccaactacttattaaataatgaaacagttaaacccattgttatagaaccaaatcagctaaccaaatcacagtttggtgcactgcagcaggctattgaaccgattggtaaagtacaattttttggggcagatttggtaaaaatccaccaaactatcagccagctgacttgggtggaatctgctaatgtgcagcgtgattggaataatggcgtggttgtttcggtcattgcacgcaaacctattgctaactttggtagtgatagattgcttgatgccgatggcgtcgtgtatgagcctgccgaaagcagtcagctgatgaatcctaatttggttaatttgcatgggcaagataccgaatctcagcagatcatgcaaaagcttaagcggatcaatacttggtatgcgcctttagatgttcaggttcaggatttgattttgacacctcgtcaaacttggattatacgatttaataatggcatgcgtatcatggttgatcatgaagatgcagagcaaaaattgtacaatttagccatacagttgcaaagtgctttggcaaatgattttggacgcattgactctgtggatcttagatataagaatggttttgcaatcgcttggcgtaaccaagcttaatattttattgataaattgatgctcattgaccaatttgggcattttttgaagtggtttaaggaaatcgtgtgactcttcaagcggtaatacatattagctctacggctgtctgtacagtggttgggtattttgaaaccaaaggtttggaaaaacaccttagggtttcggctgtcggcttggcgcacacagatgctttttttggtggtcgcgttgatcatcgtgaatatcttttatcggcaattcataaatctgttcgtgaggccagcgatatggcgggtttacaaatcatttcacccgtcttgtgcatggcatctgccatgatgaatatgcagaatatgagtaatgaggttaatatcgatacagctgatcgtatggtaaccccagagcatattcgtcaagcaactcaagcgatgtctgatcaaatcataagccaagaccgtgcaccgtttcagatgaatcgccaattgatttttttagaagattatcatgtccaagatgccaaagggttgatgacggataaaatttgtgtggcaagtcatgtaattgatatgccaaccaatcagttaaaacagatgatcagcttggttgaacaagatgatttgcaggttgcatcatgtctgtttgatgggattgctggtgctgaatacgccttatctgaggatgaaaaacaagcgggggtttgttttattgatattggtgcgggcatgactaaggtgtgtatctataaagatggtattttgatttatagccattgcttggatatgggcggtgtgaccgtggatatggacattgccaaagagtgcggtattttacttgcagacgcggacagctttaagagacaagaaggaacattgaatcgtcataaatattcgtcaggtgctgtggtgacctataaacgacataccaaacacgaaaaaaccatgctcagacgagagctaaatcaggtcatagaggcacgctatcgcaagctatttgataaagtcattgatgaaattgatgcatctttattggttagtttggatgctggaattgtcttggcaggcggtggttcgtctatggatggattacttgattttacaagaaaccatatcggcatgaaagtacggctaattacgaataatccaagggtgaaattggatcctgagcgtctatctgacgataatattaagctacttaataagcatctgtgcgataatacgctacatactgcgatcggtgcacttttatttatgggtagcgctcaatatgctcgtgatcagcagacccaagaagctgatgaactggatgattcttggatgactgagcgtgtgagtatgatcagccagctttttggacaatttaatggggggattaagccaggtttttaaagggttagaccgatatgatcaatcaattgattgcaataatggtctaaatttaacacaaaaacctctaggctttttctaggcttttttagcgaaatttactaataccagcttgcacagcttgccaaaagtactgattgtgcgtacaatggcgctatacttttattgaaaacaattttttggagttaggttatgaaatacggaatggctgatgaatttcaaccagaaaccaatggtcaagcacgaatcattgtctttggtgttggcggcggtggcggtaatgctgttgagcatatggttcgccaaaatgttttgggcattacttttgtttgtgccaatactgacttacaagcactaaataaattatcagcaccaaataaaatccaaatcggtgcggacgcaactcgcggcttgggtgctggcgctaaccctgaagttggtcgtaatgccgctgagagcaatgaagatgaaatccgtgccatgctcgagggttataatatggcattcatcaccgcagtatgggcggtggtacaggtacaggtgcagcccctgtggttgctcgcattgcaaaagaaatgggcattttgacggttgcagttgtcacaacaccgtttagttttgagggcaaacgccgagctgctgctgctcgtaacggcattgatgctttgacccaacatgtagactcaatcattaccattcctaatgataagctgactcaagcatatcgcaatttgacgatggtagatgcttttaaaaaggcggatgatgttttattacatgcggtaaatggtttgactgaaaccatcgtaaacccaggtatgattaacatcgactttgaggatgtgcgtactgcaatgagtgccaaaggtcatgcgatgatgggtatcggccgtgctagcggtactaatcgtgcctctgaagcgatggaaaaagccattcgctctcctttacttgatgatctcaatctaagaaatgcccaaggcttgattattaatatcatcggttctggtgtgagtatggatgaggtgatgtctatcgttgccattggtgagggcatgatggatgaagatgcacatgtattttatggtttggtagaagatcctgatatggaagatgagattcatgtgacggtcgttgcgacaggtctgacggttaatgagcgggcagtaccagtcaaattatcaggaaataagcaagaaacattaagaacgcatacaagtgcattggcagaagaaaatcagcaagcctccattccacgccaaggtgtaccaaagccgatcagtgttggtacttttttgcaaagagagcaacaaaaaaatagttgatttatgatagaaccaaagtcctgcccatatggcggggcttttttaatgttaatgatgccagttgatgatgaattgggaatttggattatgaaaaaaatagacctgcacatgcacagtacttgctctgatggtactaatacaccaacagaattgattaaaaaagtcgctttggcaggcattcagatggcggcattaaccgatcatgatacaatcaaaggattggatgaagccaaacagactgctaaaatggtcggcgtggagctgattcgaggggtagaagtcagttgcacccataccttatctgggggctatggtaagcatcaagaaattgataaaattatccatgttgttgcactgaatttttcggatacactcaagatgaatgaagcactgcaatcactacaagacagccgacatctgcgtggacgacaaatgacccaaaaacttgccagtttattgatgaatcatcctgatgaagagcctgtactttttgagcatttgtggcaaaaggtgctaatcaaagcagatggtaatgctcgtgctgttgggcgtgcacacattggtcaagttttgtatgaattgggctatgtgtctagtgtgcaggctgcctttgataaatatttagcagacaataaaccagcttatgtacccatacagaccatcagcatggcagatgcgattgcacttattcatgagtgtggcggcttggctgtgcttgctcatccaacacggtataaactatctgcaacacgcacgcaaaggctcatcagtgattttgctcaatatggtggcgatggctgtgaattgccaaatcatgagccattaagttgtattgagatggttggccgtacaattgctaaacatggtttggcaatatcacttggtagcgattttcatggcgacacgatgccatggcgaaagcttggctcaacggcagtgaagagcgataaccaaataggcatctgggagcggtttggtgaaatatactgatagattatgatgaccatctattataggctttaagcttcttgaaaatccgctaaagataatttcagtgcctcaaggcaaacccaaaactcaaaacctcgatactgcaagaatctcagctgcttggctttatccttgggtgttgttgggatagtatctccatatttgcgtgtacgcacctcaacagccagcttaagccaattgaccgtctctgattcatcacaagtaagaatagtgccatcggtcaatgagtctgctccagcttgctggatcagttggtcaatgctatcaacactctcaggcaagttgactttggcagactttaaaacttgtagaatgtggttttttccacgaccttttcggatactttcacgaacgagcatcatagcaaagcgttcatctgattgatagcctttgtgagcaaattcttgtaacaaatcctccaccgcttgaggttcgcagcctttggcaagcagttttttttgtaattcatgctgtgacatttctcgccgtgataaataataaaacgcaagccagcgtaaataattggttgccttgtcagtttgtattaatggttcaatggcaacatcactaaggctgtcagcaagttttttaggcatggcaatagaatcttgaccgccttgagtatgttttaataattcgccaatttgggatttggataaagatttgggtttttggttttttagggcttttggtggttgtgttttatctgtgggcgtatgactgattggggctgtgtcatgacttgatgcggtcactaaagattttggttggcttggtttttttaaggtattattttttggcaaacggttaagctttggcggcttggttgtggtgagttgataaaaattggtttcatcaagtacctggatttgatgattatcagcagaaacaggcgattcgcccatttctgctagaacttcggataaggtcttgattgtcatgatgagtgattagaaattatcatcttctaaatgctcttcaggctcatctgattctacgatgggtgtgactgtggctaatttactctcacgaactttggcttcgatttcgctggcaatggcaggattttcttgcagatatttgaccgtattggctttaccttgaccaattttaccatcaccataactgtaccaagcacctgacttaccaacagcaccaatatcaacacccaaatcgatcacctcgcctaggcggttaatgccctcaccgtacataatttgaaattcggtttggcgaaatggcggtgccatcttatttttgatgactttgacgcgtgtttctgaaccaataatctcatcgccatctttgacagagccaatgcgtcgaatatcaagacgcacagaggcatagaattttagggcattaccacctgtggtcgtttctggactgccaaacatgacgccaattttcatacggatttggttaataaaaatcaccatgcaatttgaacgcttggcgttgccagtaattttacgcagtgcttggctcatcaagcgtgcttgcagacccatgtggctgtcgcccatttcaccttcaatttcagcttttggagtcaaagcagccaccgagtctacgacaatcagatcaatggcacctgagcgtacgagcatatcggcaatctcaagtgcctgttcgccattgtcaggctgcgagacaagcaaatcatcaatattgacgccaagctttttggcataaatcggatcaagtgcatgttcagcatcaataaaggcacaagtaccgccttgcttttggcactcggcaatggtttgtaaggtcagtgtggttttaccagagctttcaggcccaaaaatctcaataattcgaccttttggcaagccaccgatacccaatgcaatatcaagcccaagcgaacctgttgagaccacatccacatcaagcttggctgtttcatcacccaaatgcatgatggtatttttaccaaactgtttttcaatttgagccaaggcggctttgagtgctttttctttattttcgtccatagatattcctagaattaatatgattgccctgttgcaatttcgctgaaaaaattacgctgacaagcttgacaatcatgttactaaatttatcgctaattatagcataactgccttttttatggtggtttatcctaaaaatattttgtgtgtcagttgtgtcattttaaatgaattgtttaacaatcatggttgtgagcttgggggtttattttaattaaactttcgataaaaaagcgaccgcaaaaatattttttatccaaaatttgacctgataaaaaaccatctgccatcttatccatgaaatatgtcaaatcattgtgaaacatcaaagccagcacatcaatacaaacaatgtgcctgatttttgtgattgtgattttatctatcatatcatgtgtataagccattgattgatattataaaaatatctaaaattggcattgttcaaattttaatcaattcctataaaggcattgtaaatacatgcttatcgctgcgatctatcaagtatttttgaaagttatccacagcttttgtggaaaagttttttgggtttatgaaggtcagatttggcagacttggaaaatttttggggatttgataaacaacttatcgtcatatttattaagaaaatttttagaatattgtttgacaagtcgataagtttcacaagtttttatcagtattattgggctgattttaagggattaatgtggttcaattttatccattcaaccaaaaattgaaccaaatgaactggccttataaaattaaaaatgtggtacaatgattgtaaatttttgataacaattaagagcatttgataagacacgcttgcaacatgggatggactcgatgacgcagataagattttcagaagcaataagcaaacttcaatcacgatttggtgatcagctttcaaccaatatgaccacccgtgagcagcacgcacatacgacgacttggctgcttaatcagcctgctgatgcggtcttgactgccaagcataagtacgatgtggcagatgcgatcaagatttgttatgaacaccatatgcctgttatcgcatttggtatcggctcatcattggagggtcagctaaatgcaccgtatggcggactttgtattgatatgtcgcagatggatgaaattgttgcgattaatgaagaggatctgacggcgaccgtacaagcaggcatgaccagagaagtactcaatgactatttgcgtgcaacagggttattctttccgcttgaccctggagcgaatgcaaccattggtggtatggtcgctactcgagcatcaggcacaaatgctgttcgctatgggacaatgaaagaggtggttttatcgctggaggtggtattaccaacgggtgaaatcatcaaaacaggcacacgagccaaaaagtcatcggctggttatgatttgacgcgtttgattgttggttctgaagggacgcttggcattgtcacagaggtgacggttaagctatttgggcaacctgaagtgattgggagtggtacttgtcattttccaagcattgatacggcttgtcaggcgaccattgccaccattcagatgtgtttgccaattgctcgtattgagctgcttgacccgattcagattcgtgcatgtaatcagtattcaggcttatcattgcccgaaaaagccaccttatttgtagaatttcatggtactaagcagagcgtggcagagcaggcgactttatttgagcaaatcatcgaagactttggcggcagtgattttgagtggggcagtgatgaagcagtacgcaaaaaactgtggagtgctcgccatcatgcgtattatgctgcctgtgcgcttagaccgacggcgcgtggactgtcaaccgatgcatgtgtgccaatttctcgactggcagaatgtgtgacacaaacccaagccgatatccaaaagtcaggtatgcttgcaccaattgtcggtcatgtgggtgatggtaattttcatgtgctactgcttgttgatacaaacaatgatgaagagcgacaaaaggctgaagaaatccttgagcgtttggcggtgcgtgcaattgaaatgggcggtacttgcacaggtgagcacgggatcggacaaggcaagcgtaaatatatgcaaaaagaacatggtgctgccatcggtgtcatgcaggcgattaagcaagccattgaccctcgaggcatcatgaatcctggtaagatttggtttgaccttggcgataatactatatccactaatgaatcaaaggcctaacactcagcaaggtttcacactgattgagacattggttgttcttagtatcttggtaatcattggcatgattgctataccagcctatgactcgctcatgcgtcgttatgagtctcaaatggtgggtcggtatgttcaagaagcactccgacgagccaagattgagtcggctttgcaccaaaaagatgtcatcatttgcccaattaacaccttgggtgtgtgcgatagatttgggcagtctggtttgatggtgtttattgacaaaaataaaaacaatcgcaaagatgacagtgatgctttggtgttaaaagaatcatttgagctaaaatatggcatgttatccatgactgtggcactacatcggcattatattaagttcatgggcgataatgcaaagcctcgtggatacatgggtaatgtgcgttattgttcgcttaatggcgatgctgcattgagtcaccaaacaacgattaatatgcatggtttgagcagaatcgaaaatggtgatgttaccaagctcggctgctagcttaagacatacaatcattcatcaactcccaaacaaagctgtgctaaaatggcagagaaatagtaaccaagaaggcaatttatggcggtcgatttttcaaataccctaattgtcgcaatttcggcgacagctttgtttgatttggcaaaaaatgaagccaagctggctgaattggttgccaaagataaagataccgccgcgcgtaaatttcaagcataccagcaggtgcgtgaaaatgagatcttagataaaggctcaggctatcctttgattgaagcactgctcaatcttaataaacatcagccaccgatggaatatcacattgagtcgccctatgttgaggtggtgattgtctccaaatcatcacctgatattggcattcaagtgcttaattcgattcgtgcctatggtcttgggattactcgctcggcatttatttcaggtgatttggttgcagattatatcaaggattttaatgttgatttgtttttgacgaccaatcataaagacgctcagcaagttgtagatgccaaaatttgtgcgtgtgcggtacttgatgcaacaccgatcagtattgataagctcgacagtcatcagcttcgcattgcttttgatggcgatgcagtattgtttgatgattcaggcgagctggtttttaagcaagaaggtttgtatgcttttcatgcacgagaaaccgaaatggcagatttgccgattgaaaaagggccgtatgctgattttttgatcaaattatccaaattacaagccaaattacccaaccaatcgaccgatgcgccacacaatccaattcgcatcgcactggtaacagcacgcaatgcacctgctgatatgcgtgccatcaaaaccctaaggcagtggggtgtcacggtggatatggcattttttttgggtggtcttgataagaccaatgtgctaaaaacatttgcaccgcatatcttttttgatgattcgatcaagcatattgatgctgcacgctcagttgtaccatcagcacttgtgccttatcattctgaatctcagctaaatattctagcacctcaagcaatccctgatatggaagatcgggcatttactcccattaaacccaaaaaacccaagacatcgtcatgacacagtcatatcaacatcttttaattaagcttgccatcatcgctacgatgactatgttactacgacaaagtactaagcctactactaataagacaattttaccaaaatattatgataaatctgattgatacacatacgcattttgatatcccagaatacgatgataagcgcgtgcaatttacccaaaacgctgataaaaatggcgtacggcatttgctattaattggctatttggcaaaatattttgaacgcatggttttggtcaatcaagccattaatgcactcaaacacgcaccaagatcacatttggcttttggactgcatccgttgtatatcaatgaacagcatgatgatgatttgggtattttagaagattatcttaataattatccgaccatcgctatgggtgaaattgggttggatacttatgctaagccactaaaacaacccgacatttttcaaaaacaaaaacgattttttgttgagcaaattcagcttgccaaagcgtatgacttgcccattttgctacacatccgtaaaaatcatgccgatgttttaaaaattttggctgagcaaaattatcatgctcatgacaggggtggcattgcccatagttttagcggcggagaacaagaggcattggcttttgtaaaacacggatttaagcttggtattacaggtcagattaccaatccaaatgccaaaaagttgcgtcggtctgtgaaagcggtttttgataagtatggtattgaggcgtttgtgattgagacggattgtcctgatatgatgccgttgccttgctcgcatttgggacaatttaatgaacctgctcacttgcattgtgtgctagatgagctgtctgaattatttaattatgataaacaattattagcaaatcagctttggaaaaatagctgtgatgcactgcgtatggattggagatatgactgatacgatacaaatggattatgaccgccgctttatgggggtaagtacactgtatgggcaacaaaatcatgataaatttgccaaagccattgtttatgtcattggtgtgggcggtgtgggttcgtgggtggccgagggtttggcacgaacagccatcgggcaaattgtcttggttgatatggatgtcttggtcgaaagtaatatcaatcgccaattgcccgcactaagccaaacactgggcgaaaataaaattgaagtgatggcagaacgcctgcgtggcattaacccaagggtacaacttgactgtattgatgagtttttgacgaccgataatatcaagaccatcttacccaatcgtgctcgtgtggcagcattaaaagctgaaggtagggcggtcatcgtgctagattgtgtggatgatatgtctgctaagcttgccattgccttacattgtcggtttaataaaattaaatgcgtcattgcaggcggtgcaggtgcaaaaattgacccaaccagaattggtgtggctgatttaagggatactactcaagatccgctattggccagattacgctcaaaattgcgagaaaaaggcatcggcactagccataaagaaaagtttgggttacgctgtgtatattctgatgagccaccaaagctaaccaataacctttgccaaacccatctaaattgtgggggatttggctctgctgtggtaatcactgcaactgtgggtatgctgatggttggtgaagcactaaaaatcatcagtactcactaaacaatgctaaaaagatactaagtgttatcatcaaagcagacgctgataatcaaataaaatcagccaagcgttgttttttaaggtcaaatccatggcgttggctgatatagtattgaccataatcagtcataaataatcagctataataagtgtatcacgcctaagttatgttggttttgattaaaaccaacataacaatcactggataaaaccaaagttactcggtgcgtaataagtcatttaggctggttttggctcgtgtttgggcgtccacctttttgacgatgatggcggcatatagactatattttccacaggggcttggcaaattgcctggtaccacaaccgaacctgctggcacacggccataaaaaatctcgccagtttcacggtcataaatgcgtgtggattgaccgatgtacacgcccatggagatgaccgaaccttcctcaacgatgaccccctcaacaatctcagagcgagcaccgataaagcagttatcttcgatgatggtagggtttgcttgcagtggctctaacacaccgccaatacccacaccgcctgatagatgaacatttttgccaatttgggcacatgagccaacggttgcccaagtgtctaccatcgtcccctcatccacataagcaccgatgttggtataagatggcatgagtatcacatctttggcgatgaatgaacctttgcgagcgaccgcagggggaacgacacgcacgcctgcatttttgaaatcttcttctgtccagccattaaatttggtgtccactttgtcataaaaacccaattcacctgcattcatgggtttgttgtcattgattttaaaggacaataataccgcttttttgacccattggtgaacaacccactcgccatcaattttttgggcaacacgcaaagagccattatccaacgcttcaataacctcatcaacagccgcacgaatttctgggctgacggtttgggcggtgaaattggcacggtcatcaaaagccgtttcaatgatagttgcaagtgttgacataatcactcctcaaaaattcatcataaatggtttgcttattttagcatatttaaagcacaaaaaacgcttaagccgacatttatgggttaaattagggtatgggttaaattaggggttaaaatcagtcataaaaatacatgatgaccgactaaactcttagatgacgctcaatccaagctaagatgtccacaaagactttttgtgcttgtttttcatgcagtggctcatgacgcatattaggataaagttgaacactgaccgagcagttggcatgtatcagtttttcttgtagtgtttgaatgtcttgacccatattgcctacggggtcattattgccactgattaataaaattgggtaattgcttggcatattggtataccaatcaggacgcatggcacgctgcatcaaagcaaataaagtcatccagccattattggtaaaggcaaatcctgtcagcggatctgtttcaaaggctctgacggcatcaatattttcactaagccaagcaaatggtgaggcactgatgggcgagcgaagctgggagagtaaaacatgattcatcagatgagcagccttttggttcacctgtttggcaaacagctgatttaatagcccaaagctcaccaaactcatgcgattgagcagtccaaaactgtctgctgtccccatgagtatcacgccatcaaagcgtgtactgtgatgggtcagtaccgttcgcacaatgaatgaccccatagaatgccccatgatataatgggaaactgggcgggaggtgagcgtgcgtgccttgtcttttaatttatccgccatgatgatgacatctttacacagggtttggacggggtgtttttcgtcaaaaaaaccaagctcgtatttgtccttgactgtctgcccatgcccaagctggtcataagttgccacaagtacgccattatctgccaaaaaccttgcaaaatcagcataacgaccgccatgctcactcatgccatgcacgataagcaaagtggcttttatttcaccttgtggcacaaaaaacgcatgatgcaggcggtggatttggttggatgataggataatttgggtcatggtgatgttggctaatactaaattggtgattgatgagtttttggcttttgacttattttgacttataacatgatttgtttgacaaaaattgtaaaaaagctgccatctcatctttaaagcatggataaaaattggcattaaaccccaattttatgacaatcaaaaacacccaactttttcgccacgctctgcctttgccaatttctcttcggcaaggacttttgagtacgcacaggcggcgggcaatcttcaccataatactgacggtcggcaaagtagcttgaacgcaccatcggatttgcccaaatgttaaaaaagcccagctttttgccatattcggtataacgggcgaactcatcaggatgtacatatctgtccacaggagcgtggtttttactgggggcaaggtattgcccaatggtgatgatgtccacatcatgggcttttaggtcgtcaagcaaggcataaacctcatcttcggtctcgccaagcccaaccataaatccacatttggtggcgacatcgggtcggcgtgctttgtattgttttaataagctcaaagaatgctcatagtctgagcctgggcgaaatgccttataaaggcgtggcacggtctcaatattatgattaaaaacatcaggggcggtttgggttaataaatccagtgcaacctgttcacgcccacgaaagtcaggcaccaaaatctcaatcaagcaatttgggctaagggcttttgattcgttaatgacatccacaaaatgcccagcaccgccatcttttaaatcgtctctgtccacgcttgtgatgaccgcatattttagcccaagcccaagtatcgtctcggcggtgtgttttggctcatctttgtccagtgggtttgggcgtccgtgtgccacttcacaaaatgggcaacggcgtgtacaaatatcccccataatcataaaagtggcggtaccgtccccaaaacactggggcagattggggcaggcagcttcttcgcagacggtgtagagtttttgcttacgcagtgtgcctttgatgcgttccacctcggcaggactggataatttaacacgaatccagtcgggctttttgggggtctcaacagtgggaatgaccttgatgggaatgcgagcgactttgtcatagccacgcaatttttcgccttgtacggcttttttgggggtaggttttgggcttggggtataggtttggacggtcatggtttgcctaatgattaatgatatctattgttatggttcggttgttggtgcgtatttggtgcttttattgacccaattttgatatctattttggggataacacttgtatgatatgcctattatacgccaaattcaggtacttgttaagcgtaaagttaaatcgcacccaagctcgttaattatgccaaaacaggtgtttcaaccaatattttaaatatctatgatctatccattcaatcacggtttttaaaatgtatcaagattttttgtgttaaaggtgataaaatcaagcggtatgatgacttaaattagtatgtttaattatcctagaatgtttaattatcagatgtaattatcagagttttcattgggcggttttgattgagtgattaaatgctcaaaacactcaaaacgcttgctttgaagacttatccttgattgatgaatggtatctttgatttatgaaaaaaaccgccattattttagtgaatctgggcacaccagacgccccaacgcccaaatcggtacgccgctatttaaaagaatttttaagcgacactcgtgtgattgaaatccccaaattaatctggcaggtgattttaactggttttgtgctaaccaccagacctaagcgtgtggcacatgcttatgccagcatttggatggatgatggctcaccgttattggtcatactcaaaaatcaagccaaagatttgcaggatttattaagccagcaaggcataaaaacccctgtttatcctgcaaccacttatggcaatccttcgattaaatcggtgatagaggatttgctggccgacggggtatcatctttgattgtattgccactgtttccgcaatattctgccacatcaaccgccgctgcctttgataagattgccaaactgttattgcacaaaagacagctgcctgagcttcatttcatcacagaatatcacaatcacccgacatatattgaggcattggcacagtctgttgagcgttattgggcggtgcatgggcgtgccgataagcttttgatgagctttcatggcattcctaagccatatgccgataagggcgatccgtaccctgaacaatgccgtacaaccgccgttcttttggcagatcgcttggggctgtctatcaatgagtgggcgatgagttttcagtctcgttttggtgcccaagagtggctaaaaccttataccgatgagctgcttggtgaatggggagcggccagactttcggtacaagtcatcagcccagcattttcagccgattgccttgagacacttgaggagcttgcggttgaaaataaaggcaattttttgcaagcaggtgggcgggcgtatgactatattccagccctaaacaccgatgagctgcatattcaaatgatggcggaacttgtcaaacaatatatataaagtatcttatatatcaagcatctatcatactaggctaaagattggattggagtataaaatgagcaaaaataaaacccccgattatgtattgcgtgcaaacgcaaattatcgaaaaaagcacacaacaactaaatcattgcaacttcataatgaaaaagatgctgacatcattcaagcgttgcagaatgaaactaaatcttttaacgcttttattaaagacatactgcgtaatcattataatattaataaaaatcaataacttataaactttttggatattttcataatataatgcttgattatgccctacagttagggcttattaaaaacataagcaagggtattgggcaattgcaacaaaccaaaaagggtttcaaaatatctaatcaaatcttaatataaacaagcggtaggttctaccgtgttagtctatggagttgatgtaagtccaagtttaaatgaataaggtaaacaacattgaagtagaaattaaacgctaaatttgcctttgggtaggtttagataggttttaaggaacaggattagataacataaaataacgcaccgatggtaaaaatctcacaaaaccaagcaggcttgactttgaattgattttaaaaagttattatactaaaaattatctgatattaagatagtttatggatatatttactttaatttgtttagtttaatttgtttaatctaagcttttatcaaatagaagaacatcataatgaaagcaacactaaaacagctcaaacaaacccaagccaattctgcggtaagtatttttgtcaaaacgcaccgcactcaccctgaaaatgaacaagatgccattgctctaaaaaatcagctcaaagttgccgaagaccgtattaccgaagagcatgataaacgcaccgctgacgccatcttggtgaatattaccgctcagacagatgagcttgaccacaactataatctagtacgctggcaatttttgcagctgagtcagaagcgaccgtacttcgtctgccttttgatgccaaagagcgtgtgattttggggaataagttcgctactcgtgatttggtgcgtgatttatcagaggcggtgaattattatgtgctggttgttaccagcgaaaacgctcgcctattggttggcacgaacggcactttgattaaagaagtggtgggcgacagtccacgccaagaagtccatgatgagttggcattccccatcaaaaataccacattaccaacaggcagtaaatcagaccgtacaggctcatcagatgaccacagctatctcaaagagtttatgaatcgtgtggataaaagcttacagcgtatctacaacgcatcgccactgcctgtcattttggtgggtgattcacgcactttgggcttttatgagcaagtgtgcgataattcatcaatcattttgggtaaggttgataacctgccacatcttaaagatggcaatgcccaagagattatcgatggcgttcaagagctggttgaaaatcagcgtaaaactcgttacgaaactgcccaaggtgaacttgaaaaagctcgtaacgaaaaaatggttcgcacagacctacaacaaatctatcgttctgccgttgagggtaatgcggttaccttacttgttcgccaaggttatagcgtacctgctaccatcgatgaacaaaacgcaactttattggttgccgaagatgcaaccgatgatggcgtaaatgatgatgccgttgccgaaatcatcgaattggttgatcataatggcggtgaggtcgtctttgtacctcgtgagcaaatgaacgaaaaagagcctattgctttgatgactcgttactaatcgatgaccgattggctaagtttgccaaactgcttaaaaattcccatgtgaaaaatccccatgtgatatggggattttttaatgccatcacaatctattgaatctatttaatctatgactattaatctgataaacccaaaaaaatatcccaaaactgggatatttttttgatgatggcgaatgcttagtgaagctgtgctaggatttgctcaagcgtttggcttggacgcattgccgctgcagtcttggcaaaatcaggggcataatagccaccgatatcaacagattgcccttgaacttgattaagctcggcgacgatggtgtcttcattatcgcttagggctttggcgatgggggcaaatttatccgccatggcggtatcgctgttttgggctgccagcgcttgtgaccaatacatggctaaataaaaatgactgccacgattgtcaagctcgccgactttgcgttttggtgatttgtcattgagtagcagtttttcggttgcacggtcaagcgtttctgctaggacttgtgctttggcgttgttcgtggtctgtgccaaatgctcaaatgacaccgccaacgccaaaaattcgcccaagctgtcccaacgcaaatgattttcttcgttaaactgctgtacatgcttgggtgctgagccaccagcacccgtttcaaacataccgccaccattcatcaaaggtacaatagatagcatcttagcagaagtaccaagctctaggattgggaataggtcggtattataatcacgcaatacattacccgttaccgaaatggtgtctagaccttgtttcatacgctcaagacttgccaagcacgcatcggcaggcggtagaatttggatatctaagccatcggtatccaaatcgcccaaatagtgatgaacttttttgattagctcagcatcgtgggcacggtttttatccagccaaaaaatggcaggcgtgccacttaggcgagcacgattcaccgccaagcttacccaatctttgacagcggcatctttggtttggcaagcacgccaaatatcgcctgcttctacggtatgagagctaagcaccgtgccatgatcatcaatcagctcaactgtaccatcatgctcaatctcaaaagtcttatcatgcgagccgtattcttctgccttttgtgccatcagccccacattagggacactgcccatcgtggttgggtcaaacgcaccatgctcacgacaaaaatcgatcaccgcttgataaacatgggcgtagctgctatcaggaatgacggccttggtgtctttggcgttgccatttttatcccacatacgacctgaattacgaatcatcgcaggcatcgacgcatcgacgatcacatcgcttggtacatgtaagttggtgatgcctttatcgctgtctaccatggcgatatctggattggtcgcataggcttgtgcgatggcatctgtgacacctgtgcgtgtatcagcgtctaatttatcaagatttgccaaaagatggccaaagccgttatttacattaataccagcttctgccagcttatcgccatattgctcaaatacaggggcaaagaacacacgcaccgcatgaccaaagatgatggggtcagacactttcatcatcgtagctttcatgtgtagggaaaatagcacatctttttgtttggcgtcttggacttgctcttttaaaaagcttagtaaggcttttttgctcatcatggtcgcatcgatgatctcacctgcttttagtgccaaaggcttgcgaagctgactttggttgccttgggtgtctgtaaatataaaagaaactgttgtggcattcgccacagttttggattgctcgttagcaaaaaaatcaccaccattcatcgttgccacatgtgattggctgtctttactccattgccccatgctgtgcggatattttttggcgaagtttttgaccgcttttggggcgcgtctgtcagagttgccctcacgcaaaacaggattgaccgcactgcctttgattttatcgtagcgtttttgaatgtctttttcttggtcggtttgggggttggttggatagtctggcagctgatagcctttcgcctgaagctctttgatggcagccagcagctggggcatggatgccgaaatattgggcagtttaatgatattggccttaggctgggtgaccagttcggcaagttgggctagagcatcaggggtttgctgctcttgggtgagatactctggaaaagccgccaaaatgcgacctgccaaagagatatcactggtcacaaaatccacgccagcggttgcaccaaacgcacgaatgatgggaagtagcgaatgcgtggcaagggctggggcttcatcggtatgggtatagataatggtagatttgctcatataaactccttgaatgtcaatataagatttggttacaatcgtcggtattattccatactttgcttgttttgcctactttacaaaaacaaaagtacaaaaacaaaagtggcgtattcatgaataaagatgataagattatcagatcattttaatagtttggataaaaatacggttgtgtatcaggtttgtttgaataattcacttaaatgataaaaatcatatgataactacactatgttaatgataatagtgtcatgacaatagtgtcatgacaatgctcacagccgtgttttttgtggcgtctgccgataggtgcgatagccgatatgtgctataatagtaagtcatataaatagtcagtaaataatgatcattgagaatgcgtcatgaaagtattgggattggagacatcttgtgatgaaacagggcttgccatctatgatagtacgatgaatggcggtcgtggcggcgtgctgtctcaggttttgtatagccaaattaatctacatgccacctatggcggtgtcgtgcctgagcttgccagtcgagaccacattcgtaagcttgtgccgttatttaatgagctgttggatcaggcaaatatcaccaaatccgacattgatgcggtggcgtataccaaagggccagggctgattggggcgttgatgacaggggcattatttgggcggacgctggcgtatgggctgggcgtgccagcggttggggtgcatcatatggagggacatctgttagcaccgctattggccagtgatgaccccccaagctttccgtttgtgtgcctgctggtgtcgggcggtcataccatgctggtgcgtgccgatggtgtgggcgtgtatcagatattgggcgagtctatcgatgatgcggtgggtgaatgctttgataaaacggcaaaaatgctcaaactgccctatcctggtggcccaaatatcgaaaaattagccaaaaacggcaacccacacgcctatgagctgccaagacccatgcagcataaagggctggatttttcgttcagtggcatgaaaaccgccattcataatctcatcaaagacacaccaaacgcccaaagcgaccccgccacacgagcagacatcgccgcaagctttgagtatgcggtggtggatactttggtcaaaaaatgcaccaaagcactacagatgacaggcattcgccagctggtggtcgcagggggcgtctctgccaatcagatgctacgccgcaccctgaccgagacgctccgccaaatcgatgcgtcggtgtactatgccccgaccgagctatgcacggataatggtgcgatgatcgcctatgctggcttttgtcggctcagctgtggacagtcggatgacttggcggttcgctgtattccccgatgggatatgacgacgcttggcgtatcggctcatagatagccacatcaatcataccaaccaaatcgtacaaacggttgatacatgccaaaaataccatattgaaagtagggtttgggtattatttatgtaacttatatctaatttggtgttgatactttgataaagccttgctatactgtaacctaaatggatatgatagagatttttccatttatgccagcaaaagagatagatagatagatagatagatagaactctgtcttttatctgtccgctgatgctttctgcctgccaccgatgatatcatttatctgctttttaggcatcagttatttcaccgtgatgactgatgtgatgacttaaccaccaaaagagagtgctaaatgaaaaccatgaaacttctccccctaaaaatcgctgtaaccagtgccctgattgttggcttgggtgcggcatctactgcgaatgcacaattagttagtggaacgattttttccgaatatctttttagacaaacctttagctaaacagcactaccataatgtggtggtcggagatacttctatagtgtctgatttacaaagcaatagcgatcaattgaaattttattctgatgatgaaggattagttcctgatagcctattatttaataaaatgcttcatgagcagctgcttaatggctttaaagaaggtgatacaatcattcctttggatgagaatggtaaacctgtctataaagtagattataaattggatggtaaggagccaagaaaagtttattctgtcaccaccaaaatcgctactgcagaagatgttgctacaagttcgtatgcaaacggtattcaaaaggacatcgatgatctttatgattttgaccatcaggttacagaacgcctcactcaacatggtaaaacaatataccggaatggtgagagaattttggcaaatgaagaatctgtacaataccttaataaagaagtacaaaataatattgagcatatctatgagctggcacaacagcaagatcagcatagctctgatatcaaaacacttgaaagcaatgtcgaaaaaggtttgttggagctaagcggtcacctcattgatcaaaaagcagatcttacaaaagacatcaaaacacttgaaagcaatgtcgaagaaggtttgttggatctaagcggtcgcctcattgatcaaaaagcagatcttacaaaagacatcaaaacacttgaaagcaatgtcgaagaaggtttgttggatctaagcggtcgcctcattgatcaaaaagcagatattgctcaaaaccaagctaacatccaagatttggctgcttacaacgagctacaagaccagtatgctcaaaagcaaaccgaagcgattgacgctctaaataaagcaagctctgagaatacacaaaacatcgaagatctggccgcttacaatgagctacaagatgcctatgccaaacagcaaaccgaagcgattgacgctctaaataaagcaagctctgagaatacacaaaacattgctaaaaaccaagcggatattgctaataacatcaacaatatctatgagctggcacaacagcaagatcagcatagctctgatatcaaaaccttggcaaaagcaagtgctgccaatactaatcgtattgctactgctgaattgggcatcgctgagaacaaaaaagacgctcagatcgccaaagcacaagcgaatgccaacaaaactgcgattgatgaaaacaaagcatctgcggataccaagtttgcagcgacagcagacgccattaccaaaaatggaaatgctatcactaaaaacgcaaaatctatcactgatttgggcactaaagtggatggttttgacagtcgtgtaactgcattagacaccaaagtcaatgcctttgatggtcgtatcacagctttagacagtaaagttgaaaacggtatggctgcccaagctgccctaagtggtctattccagccttatagcgttggtaagtttaatgcgaccgctgcacttggtggctatggctcaaaatctgcggttgctatcggtgctggctatcgtgtgaatccaaatctggcgtttaaagctggtgcggcgattaataccagtggcaataaaaaaggctcttataacatcggtgtgaattacgagttctaattgtctatcatcaccaaaaaaagcagtcagtttactggctgcttttttatgggtttttatggcttttggttgtgagtgatggataaaagcttatcaagcgattgatgaatatcaataaatgattggtaaatatcaataaagcggtttagggtttttggatatcttttaataagtttaaaaacccctgcataaaataaagctgggcatcagagctgcgagtagcggcatacagctggcaatgcacgcctgtacctagggggcgtgagaccacccagcctttgcgttcgtattctaggacaacccaatcaggcagagcggcaacgccatgttcggaggcgaccagctgaatgagcatggcggtcagctcagttgcgcggatgttggcaggtgctaccccattgggcgtcaaaaattgggcaatgatgtccaaatggctttcttcaacaggataggcgatcagcgtttggtcgcataaatcttggggggtgatgactgattggcttgccaaagggtgggttggtgcgaccaccaatcggctttcataagtaaatagcggtaaatagtcaatgccatcaatgggcaaatcgcttgaggtgatgagtaaatcaatctcgccatctaccagcatttggtgcggctcagggtcaaaccctgttgaaaaatcaagctcaacatcagcatattgcccacgataggtgtttaaaatcggcatcagccaatcaaaacagctatggcattcgctcgccaaacgcagcctacctgcttgaccatgtgcgaggcgtttaatgtcggattgggtgcgtgccacctgtggtaaaatacgctctgccaactcaagcaccatcaagcctgctggggtgaagctgatggggcgagtacgccgattgaccatcgtaatgtcataatagttttcaagctctttgagctgatgactgatggctgaggccgttaggttcatctcatcggcggtggtggcaagcgacccatggcgttttagggcgtgcatcatctgtaggtggcgaatctctagcataataaagccatttgttggtattgtttacattgacatgaaatttgaaattgtatatgagcagcattttatcataatatcaaacaacattcatgttgtcttaataatcaatgtgatggctttggtttttgggatatttcatctatgtctgtgtatcaaacatttaagcaatccaaaatttattaagagtgtttttttgataacataggcatgttttgaataaaaagtttgaataaaaagtttgagtaaaaagtggggaattatgggcatgatgatgcagctgatggactttattttgaccattgatcagcatttggcaatatttttacaagattatggcatgtggatttatggcatcttatttttgattatttttgttgaaactgggcttgtggtgatgccgtttttacctggagatagtctgttatttgctgcaggtgcgttggccgctgtgacaggtgcgataaatccgatcttattgatcatactgctgtctttggcggcggtgttgggcgatacactcaattatcacatcggtaaatatatcggacctaaagtatttgtcacaaattcccgctggatcaatcatcagcatttggttaatacacaaaaattttttgcaacgcatggcaaaaagacgattattcttgcacgctttatcccgtttgctcgtacctttgcaccatttgtggcaggtgcgggcagtatgcattatcgctattttttaagctataatatcatcggtgggtgtttatggattatgtcatttgtgctattgggctatttttttgggaatcagcctgccattaaagataattttacttatgtgatttttggtattattatttttagcatcttgccagttatttttagttttattaaacaaaagcttaataaagccgcttagcggatgtataagcggcttatgtatagttaatacggctgtatggttcatacgaccacaccagtattaatggcgagtatcaggcaagctgtcacgaccgtcaatgcgtgtcacgatgccttggttattaaaatgaatgctcaagtattgcgatgcgtttttaatgtcagattttttttggcgtttgccatccgtgcctgcggtatggtcataaatataatcccagcggtttggtgctagggtgtcacgcaaggcaggcgagccaagtaaatatagcacttggttggcattcatgcccacttgtatttgattggcttgggcggcagatagtggcgtaccttgaggtaagtcgatggtatacacccgaaagacactgcagccagtcaaagcaagcaccaagcctaagccgatagctttgtaagtcatcttttgcattatgattcccatatggtgatgaaatgtgatcatattgaaccaaagacttatcattatgcaagtatcttttgcgatttgggcagttttgatgatgataagttttgatgattggataaatcaatcataagcttttggcatatggtgatgattttggggtgcaagcagggcgattttatgatacattattaattaatttatatgattgcatatcatcaagttaggatggataatatatggcttttacaaataaagatttgcgtaaagctggcttaaaggttactttgcctcgtatcaaaatattagaactgcttgaaaatgctgagcatcatcatatgagtgctgaagatgtctatcgtgcattagcagcacagggcgaagatgtgggtttggcaacggtgtatcgtgttttgacccagtttgagcaagcaggcatcgttgagcgacataattttgagaataatttatcggtctttgagattgtccaagatgaacatcacgatcatctggtctgtgatgtgtgcggtaagattgttgaatttcataattcagtcatcgaagaagagcagtttaaggttgccaaagcgcataattttaagctatcagggcattcgctgatactatacggcgtatgtgatagcccagagtgcctaaaatcaagcgatgaaacccaataaatctgagtgcagctctgttaagtgcaattctgttaagtgcagctctgttaagtgtaactctattaacatccgttgcatgtccatcaaatccacccaaaggtcaaaaaatccaaaagctcagcagttgggcggcgtatcttaagccattgattatcataatttgggtggcagattatgggttatcgcagcatattgatttgttcgttggcagtggctggcgtaattttgcctgtttcagccaagcgtgataaagattgcgtcaaatcaatcataccttgggccaaactggtctgaatgacagaaggcagctgagaaattttattttcacgaatcaaatgggcaaccgcaggcgtatgcgtgagaatctcaaacgctgccacacgaccaccgccttgggcaggcaatagccgttgggcgaccaccgcctttagtgagtcggcgagcatcgtgcgaatcatgtgtttttcgccagcatcaaacacctcaatgatacggtcaatgctctttggggcgttgaccgtgtgcaaggttgccagcaccaaatgcccagtttcggcagctgtcagtgccaagcgaatggtctcaagatcacgaagttcgccaactaagatcacatcaggatcttcacgcaacgctgagcgtagggcattttgaaagcttcgggtatctttaccgacttgcctttgattaatcagcgaaagcttggagctatgctcatattcaatggggtcttcaatggtgataatgtgctttttttggtgttggttgatgtggtcgataaaactggcaagtgtcgttgatttgcctgagcctgttgctcctgtgatgagtaccaagcctgcctgaagcttggctatttttagcatactatcataaatatattcatcatagcttaactgttgtaggctgggaatgtgtgtttttattacccgaaaaacagccgccgcaccgtgtgcctgaaaaaatacattcacccgaaagcgagcgataccatcaagcgaaagtacaaaatcatgttcaagattgtgttgccattgatgataatctgtgtcatccatcacagggcgtagcatctgcatgataccatctgtatcaatgggcgtgatgtccatgggcaaaagattgccatcaatacgcagcataatgggctgttgggcggataaatgtaaatctgaagcgtttttttgatgggcaaatcttaataactccatcaaatcaggcgtattcatggcgtactccaaatgcagccgcaataaagcggcgaccgcagttaagtggtggtttaaacggtgttacttcaaactgtgttacaataccagttgggcgatactgaatgactcatgttaataatgaatgaccagccaagcggttaagtgatgcccaatgaccaagctattgggataatcgcttggttgtgatggtgaaggactgggtaacagccgcctaggttttattaattttttattaatccaaaatcaaacattagccaattttaaaccctaaaagaaggtgcgtaatggacgctatgataaccattgatgataatcagttgctgaccaattaccgcttgattaagcaggcacttaataccgccaatgatcaagctgtgcagatgaatccaactcatcgtcctgccaaactgattgcagtttctaagaccaaacctgttgcgatgatacaaaccttatttcatcagggtcaacaggattttggtgaaaattatctgcaagaagcactgggcaaaatcagtcaattatcacaattacccatcatttggcattatattggtagcattcagcgtaacaaaacccgagatattgccaagcactttgattgggtgcataccttagagcgtgaaatcattgcccagcgtctcaatgagcagcgtgcaggcatgcagccgcttaatgtattgatacaaatcaatattgatgatgaaagcagtaaatcaggctgtaaaccaaccgaactgcccacgctcatagaacaaatcatcaactacaaaaacctaaacttgcgtggcgtgatggtcattccaagtcagcaaaccgtagatgcgtttgcccgcacaaaagtactatttgatgcgatagcaaggcgttttgacttgccaaactgggataccatcagcatgggcatgagtggcgatatgacacaggcggtagcacacggttcaaccatggtgcgtgtgggaacagcgatttttggtgagcgagaccatcggtagtttgccatcataaatgatacaaaacgctcactgatgtaagcgttttgtatcatttagcctttgattgaccagccatttaccaatgggtaacggcgttcacgaccaaacgattttttggtaattttagtgccgatagcaccttgtctgcgtttgtactcagcacgatccaccatgcctaggattttttcgacagtttttggttcaaatcctgccgccacaattgccttatagcccaaatcgtcatcaatatacatttttaggatgctatcaagcgtctcataatcgcctagactgtcttggtctttttggttgggacgcagctcagcactgggcgggcgagtgatcactcgttcagggataacaggattatcctccaggcgattgcgatagttcgccaagcgatagacatcggttttatacacatcttttaggacatcaaatccgcccaccatatcaccataaagtgttgagtagccaacggcattttcagacttattgcctgttgagatgaccatatgcccaaatttattagacagtgccatcaagatcgtgccacgagcgcgcgcttgtaagttttcttcggtgacatcaggctcgctattggcaagcagtggcgctaaggctgagcgtaagcctgccacagcatcatgaatggggcagacagtataagacacatttaagcgtgctgcttgggcttcggcatcttctaggctgatttgagcggtgtattcatacggcatcatcacggcatacaccctatcagaacccaacgcatcaaccgcaatacaaagggtgagtgcactgtcaataccgcctgataggccaacaatcacgcccttaaagcctgagcgattgacataatctcttaggcccacaaccaaagcttgatacatctcagactcttcagacagtaccaaaggtgctttagcttgtgtatcaaaggttttgttttgggtgtcaaaccgtgccatcaaaagctgatttaagaatctcacgccttcgtgtgccacacggccatctgattgtgtgattaaagagccaccatcaaagacaatgtcatcttgggcgccaacggtattgacataaatgatgggcaaatgatgggtggaggagtgtcgggttaacagtgatttgcgggcggtttgtttaccaatttcaaaaggtgacgcattgatgacgatgaccaaatcagcccctgcttgtttgagcatgtaaatgggctcatcatgccaaatatcctcacaaatcaaaagaccaattgttacgcctttataatcaaacaagacttgattaagacctttttggaaatatcgctgttcatcaaagatgccgtagtttggtaggcattgcttatgataaaatcctttttggctaccatcttgtaagatggcggccgaattgaatgtgccatgatgatcaatgtgcggataacccaaaatcacgacgatgccttcgatttcggcaagttttgccatcgcttcacgcacccgttcacccaatgttgggcgtaatagtaaatcttcgggcggataacctaccaaagcaagctcaggaaagataacgatatctgcaccacgagctttggcgtctagggttaaagcgtgcatttttttgacattacctgcgatgtcccccacccaaaaattggtctgaatgatcgcaaaagtcatttgacctgtcgtggtatctgcggtatgaaaactggtttgtgtgctatcggtagcatcggttttggcttttggcatttgtaatatccttgaaatttgtgagcattgggcatcataccaagtgcgtttaaattgatgtcataaaaaatgcaatgacctcactgtcgtcgcaaatttcataaacaaattttgtaaaagtggcaaatacgccaaacattctggcttatcaaaatcgttgacaaacctgcaaatagtatagcataaacccccaaactttgtggtatagtaatcttaggtttctaaaaattagtggtgaattggcgtttatgtttgcttttattttaaatattatcatcatcagtgtggtcatgtggctgtttttgaaatttatgtatcctaagccacccaaagcgttcttccccaaagaaggcgatgatacaagcgtgcggcattgccactactgtgggcatgcgttggcaacctatcgtggtattttattgaacgaaaaacagcctaatgaacggtttttttgtaatgctgaccatctcaaatcttatgccgatactcatccaaaagaaaatttaccaatgattaacgattgatagcttttgggttaacatcaaaaacggtagtttttatgctaccgtttttgatgcgtttgactcaaagcatcgagcgtgcttgttgattgattttatctatcatggcggcgactttggctttttcgtcatcggtcttggtgatttgagtttttagggcttgtacttcatcatacagctccaaacaaaccagcaccaaaaactcttcattggtcggtgttttgtgtttgatttcacggcgtagatcacggattttgtggttgatgtattcagccccatgctctaggtttttaatttcgtcgactgggcagacaatccgatgcggcgtacctgcgatactgatatcaattgggcgaaattcttctttggcgatgatggccgatgatggtgaattttgggtgtcttgactcataatgattccttaacaaaactgttgaatgaacgcatctagttggagcgatcgatttttgacagccaatcacgaatcacctcagcgcgtgagatggccaaggcgtttttgtcttttaaatcttgattttgggtgattaacgctcgattggcttgataaagctcatcaacttgctgttctagggcattttgggtttgttgcaggtcatccacacggttattatgatgatcaatatcaaccaatgcctgattaagcttggcttgtagtgtttcgatttgtttggcactatcgtcattggcgatgcgttgtttgagattggcaagttcggttgcggtaaccgcatattgctttttcatggcgatgatcgtctgctctaaggcttgtaattgagctaacataagatatcctaagttgatcaaacaaaatttagctaagcttatcttagcatggctttggattgtgttgtcaaattttttgtaaaaattacataaaagttggtcattatgatattaaaaagtttttagatatcatcatggtttaatcaaaacacgcgcataaactggcatgtctgtgttataatactctgtttttttgagcgattatttaaaggtaaattttaacaatttttgacaaaggtttgatgagccttaagggttaactgatgtcaacaacacacgaataaaggcaaactatggcaacagattatttatcaggttgggatgattgggtgtcagcatttggtgactggacagacatatcgatcagtgagttgcatggtattatgactggcatcatgactgtgtgtcatgcacccgataacgatggttgggtgcgtttattagaagaaatgagctttgggatacctagtgaatcggcacttgagctgttgactgactatgccgaagatgtcagctttgcactcaaagataaagatgacgcatatggctatgaacccttagtacctgatgatgagcatgagttgtatgagcgtgttttggcactcaaagactgggcgggcggttatatcactggcatcggtgtggcgggtgtgacattaagtgcagatgaaaacgagctgattggtactttgatggagattgccgccattcgcttggatgatgaagaaagtctagagggcggtgaggagatgtggctacagttatttgagtttgctcgcatggtgcctgtcagcttggctgttcgtcagcgtcaagatgtcaaaaacttggcattattaaaaggtctgccgcctgaagcgaagacagccaatgagcttgcatcagaaaagttggcggtgccagtcattgatgtgatggcaagcaagcaataggcgatatatttttcatgcaaatcatttttttagacagccatcatttaccgacactgccaccacttgccttgaccatcggtaattatgacggcgttcatttgggtcatcaagcgttattatcagcactggctgatgatgccaaagcgatgggtttgttacctgcggtgatggtatttgagccacagcctagagaatatttttcgcctgataatccaccagctcgattgaccaatttgaccgaaaaagcagagcaaatcacgcaattgggcgttcaatatctgattgtggcaagttttgatgatgcatttcgttcattatcagcggcggcgtttgttgatcttttgcacagcttaaatgtgagccatcttgtgcttggtgatgattttcgttttggtcaagatcgtgttggcgacaaagcatttttgcaagctgcaggatttagcgtagataatttgcccagcatcacccaaaatggcgtacgcatcagctcatctttggtgcgtcaagctttggcggtcggtgatttaaacgctgccaaatctatgttgggtcgctcttatggcataactggcgtggtcgagcatggcgataagattgggcgaacattggattttccaacagcaaatgtgtctttggggcgtctaaagcctgcactacatggcatttttgctgccgatgtcatcgcctatcaaaatggcgtgcgtttggattgggcatcgctgggtcaaggtggtgtgatgggtctaaaacagggcagtttatttggtgccgttagcattggattacgccccagtgtgggcggtaaacagtggcgacttgaggtgcatttacctgattttaacggtgaactatatggcgtgacgctttgggtggtgtttacgcattttttgcatggtgaacggcattatgatggtgttgatgccctaaaggcaggcattaccaacgatgtggtggctttgcttgcgtggcgagatgatcaagggtagcgttctttattgaataaaacatatgcaataacgcaccccaataccgccacagtcatcagcataaagcagccaaaacttagctgcttgattgatatcgtttgattaccccactttttaggtttttagataaatcaaatcccaaacaccatgaccatgggtgatgccacgcttttcaaatttggtcaaagggcgaaagtcagggcgtggcgtaaagttacccttttcacaactgttgataaattcaggcataccatctagcacctcaagcatccaaaacgcataatgctcccagtcggttgctgcatgaaacttacccccagattttagcacacgagcgacttttgccatgcggtcatgcgtcacaaagcggcgtttataatgtcgttttttttgccaagggtcaggaaaatacaactgaacggtgtccaaatgttgcgggggtagattatcaagtaacgccacagcatcaccattgatgatttttaggttgtgaagttttgcttcatctgccaacgccaccaaacgcccaataccaggttcatgaacttcaacgccaacaaaattggttgtgggcgagtttttagccatctcaaacaagctatcgcccatgccaaagccaatttcaagcaccaaagacgcatcactgccattgggcgtatctgtaaataaaactcgtaaatctctgattgctgagatatcgccaagcttgccaagctcatcggttggattgacataaagataccgaaaatgagcgtctaataaggcgtgttcatgatattggcttatgtgtgagcgacgcttcataaaggtattaattttacgaaactgctcaggtgtttgtgccaatttggcaaggcgggtgctgatttcgtctttgtcaatggcttgtagagattgagcgtctgccaagacattttgggcatcttggggtgttgaatttgtcataaaagggcgtacaatagctaatattaaaaacggtcattataaagaataactgacctaaccacaagctaacagcttggttttttagtcgctgttcatcgcatttaaccaaagagttgccatgtttcgcctaccttttttagaagatacaacgccaccaccattttatcaaagtcatttgagtgatgatgaacgcacccgattggatcgatggtttattggtcatcgctcccaagcgtactatttgagacgatttgctgagtttgatcgagtgggtcggttacacgcaaaatggcattgggcggcattttttatgacatttggctggctgctgtatcgtaagcgttacttagattgcgtggtgtattgtgtggcaggctggtcatttattaaggttaatattgtcattatcttggcagtggcagaatatgcattgattggatttttggcagatggcatgcagtggcctgtgcgtattttgattggtcttgcggtttgggtattttggtcgggcatggtcgcacgctgggcggatgcgtattattatcgcacggctcgccgagaaattgcagatgctctagagctataccctcgagatgaagctgcacaaaaacagcatcttaggcgtgaaggtggtgtaagcttgcttggtttgtcggtggcatttgcgatgtttgggctaattttatcaatcatcgtcgggcagtttgtaccgatgtatatcaaacaagctgagcaaaagcttttgtttgatgtctatagcgaagccaatgcggtggttaagcgtgtggatgtgattatggcgaacacaggtcaatgcccagtcaatttacctgtcaccagcacacatcatcgtgctgatatccaagtggtgacacaagcagatggtattaataccaaatgtgctgtcgttgcgaccgttttaaaggcatcttatccacttagctatctaaaagggcgaactttgacaatatacagtacgcctacccaacatggattggtatggcgatgccaaacctctttatcaaaaaaacaaacccccaaacggtgtattggctaatcattaaccttgtatgaccaagatcaaatcagtgaacaatgaaccgaatatggcagatgataccgctaccaatcagctgcagctgacaacttttcacctaaaactcatcacgcttatcgccatgctcattgaccacatcggttgggtgtttgtggcaacttacagcatgaccgctgagatcatgcacacggtggggcgtttggttgcaccgatgatggcgtattttttggtgatggggctatgtcatacgcagaatcaatgggcgtacttggggcgtcttttggcttttgctgttctctcgcagccgatttttatggcgtttcaatatgtcattggcagtgtcgatgttatcacgcaagtgctttggggtaatgtactgtttagcttagctgccagcttggcggcattaatgatctggcagatgagcgtacctatgacgcttcgggtgcttggtgtgctggcgatggcgatgattgcagagattggggagtatggggcggcgatggtgatgtgggtgatggtgtttgagatttttaaacatgacaaactcttacaacttaccgcttatgccctaagcgtccctttggcacattatttgatttatgggtgggcgttgacggtcggtcttgggtggatgaatgtgggtatgttttttgcgttaccactgatttattatcacacaggccagcaggggcgcaggctgggtggccgatattttttctatcttttttatcccatacatttattgatgcttgtttgtttggcccagactgtctgattgtacaaaagtttgcaatcaccagcccattgggtcaatgtcgatactcatgcgtaccgctttactgcttggtagtgactgtactgatggccaccatgtctgcaaaaattcatgcaagggcgggcgagtttttgccaagatgagcatctgtacctgatagcggttattttttttggtcatgggtgcatcgatgggtgcattgatggcaaaagggtgattggctggtatcaatcctttggcggcgatgatggcgtcttttgcttgctgatggtgtaaactttcggcacgaatgagtacggcatggctaaaaggtggtaatcccaactgcgatcgttcgtgtaatagttcgtgggcaaaggcgtgataaccttgacgcacaagctgagtgagtagggtattatcaggctgcaaggtttggattaggactttgcctggctttttggcacgacctgctcgacctgccacctgtatgatacgctgtgcggtgtgctcaggcgagcgaaaatcagccgataaaaatcccaaatcagcattggcaatgaccacaagcgtaacattttcaaaatgatgacctttggcaatcatttgtgtccccaccaaaatggcaggtctgttagtattgatatttttggtcatctgagtccatgcatcttttttttgcatggtatctttatcgatctgataaatcggataagttgtgcggctgacttgcggattggcaaataatgcgtgtagttgctcaactaggcgggtcgtgcctgcaccaaaactgtccatattagggctgtggcattcagggcaggttatcggtatggacgcacgatagccgcagtgatggcagcgtagttcaccatgcatgggctgtacgctttttttgtgaacggtcaaatgtgcatcgcaattggggcaattggcttgatgaccacaacttcggcaaattaaaatcggtgcataacctcgacgatttaagaaaacaagcacctgttcacctttggccaagcaatgacgcatcgcctgaattgtcttgggtacaaaagcggtatcgctgattgtcccatcgagatgctgagcatgagagcgacccaatcgcatatccaccaaatgcatacgaaccgcctgagcaccgcctgcacgattttttagggtgagtggtgttaatttgccatcttggatgagtttgagctgctcaagacttggcgtggcagttcctaaaatgattggaatcttggcaaataaagcacgcatcatcgccacatcgcaggcatgatagcgaagatgatcttgttgcttatatgacgcatcgtgcgcttcatcaataataatcatgccaagatttgcaaaaggatataagatacctgagcgtgtaccgatgatgatttgtgcgtgacccaaacgacacgcctgccaaccttgaaggcgttcggtgtcattcatcttggagtgtaacacgcagatattggcatgaaagcgtgaggcaaatctgcccttggtttggggcgttagcccaatttcaggtacgagtatcagcacctgtttgccttggtctagcacatggtgcatggcttgtagataaacttccgttttacccgaacctgtcacgccatccaacaaaaacccttgatactgccccaaatcactggcggtcttaatggcatctaaggcaatctgttgttcgtcattggcatcaagcttaggttctttgagttgtactggtgatggctgtttgttgggcggtatatgctcatcagtgatgacaagacctttattgataagaccatcaagtgcagagcgtgttgcaccgatttggcgaagtttgtcagtcccaagacctgctggatatgccatcagatgtgttaaaatttgtcgttgttttttggcagtttttggcaactgatcgatggccgtatcatcacagatggccttgtaatatcgctgcttggcgtatatgggcttgccttggttgatgagtgtcggcagcatcacacaatagacatcgcctaaggggtgatgataataagaagacagccagctcgccagtttgagcaattcatcatcaatgatagcgtcatcatcaatcaattgtttgataggtctaagcttatgaggtgcgataagactgtcggatgcgtcaatcagttcaatgacaacaccaatcagccgcctagccccaaaataaaccagcactctggcaccgattttgggcaagggcagatgactggggcataaataatcaaaaaaatcagccacaggtaccgccagtgccacttgggcaactaattttggcgtctgctgtgggcttgtggtcatggttggtaagttatagattttctaagcgttcaaccgaaggtgcgtaataataagcacccgaaaccgccgtactgacatgcttaagcagcaaatcaatcttaccatcggtctcgccaaacatactaagtagctgagcttcaatattccatagccgtgctgcataagcgatatacattaagccatgttcgccagtcactgtgccaaaaggcaggctcctgcgtaccacttccaaagtcttaccatcttccttaagattggtgcgacccaaatgagaatctgataagcgtttggctttatcaaattcaatattatcaacttttgagcggccaatagaattttcttggtcgcacacaggtaacttatcccatttattcaagtcgtggcggtatttttgtaaaagcacatagctgccgccagcatcatcaccatcagcgatggcagccacgccactcacggcatcatcttgggggttttcagtgccatctacaaagccttctaagccacggttttctacccagcgaaagccatgcgtttctgattgaatttggacgatatccttaaatatcgctaccaattcttttgctaggctaaaattaatatcatgacgcattgactgaatatgaaacatcacatcatgctgcgtggcaggtgccagaccattacccaatgggcgaaatggtttgatttgaccgccttctttggtatagccaaagcgttgccaagcttgtgcaccaaagccaatagtcagacctaaagattcgccagtaaatttggcttgtagctcatttaaagtgtgcaaagcttggcggcaggcatctgcgatggttgctgtgttattggtgataaaatcgccctccataaagatgccagcacggcaatggtcgggaatgatggcagattgtggcgttttagacatagatgaccttatatgatatcaatgaatttttaaacaatttcattcattttttaagtcaattaattaactatgaatgaattaatactgaattaataatgaatgtaaaatttggtgcttatttcagatggggcggcacttttgggtgctaaaacacaaagcccttggatgtccaaaggcttgttgaccaaagactaacataccgcttatgacaaatgtaagatagcttcaatctcaaccacgccacctttaggcagtgcagcaacctgaacagcagcacgggcaggatatggggcatttaaacaggcatcaaaaacttcattaagtgtcgcaaaatccgacaaatcagtcagcgagacattgaatttgaccgcatcagacaagctgccccctgctgccttggcaatggcttgtaaattatccatagcctgctcggcttgtgccttaaagccttctttgagcgtcatggtttttgggtcaagacctaattgtccagagatatagatggtatcgccaaccttgaccgcttgagaataggtaccaacagcggcaggtgcgtcgtctgtatgaatgatttgtttgctcatgatatttaaaaatcccaaaatagatgcattagatgtgcttggtgcgaaaataggcaacaagtttatcaaataaggtcatcgcttaaacagggtataccgggttccaaagggcgacattgggcggtggttttggcaatagggttggttcaacttaccaagaaaatgtgcagcgtctttttggctattaaggtcgattttacagcacataagacatccttattttgactgaagtgactattattatgcctattataatagaccattttaccatcaaaattcaagcgttttaggtagcttaatcatcattgatacagtcgcatgatgtttggatagccaagcaatgtgcgtaatttttcgatgccctctgccaaatgagagcgtgagcgtaccacaatgtgcagcgttgttgtgccgactttactgctttggtctgacttggtatctgttttgatgtgtgtttgctcaacaccgatattcagcacacgcatttcataaatgacttggctgatttgctcttcgtttaaactggcataaatacgcagcatggcagggaatcgcaacgcatcaggttgattttgtaaagattgatcagatttccaatctaggtgaatgatttggtaaggtgtatcggtgcgtattgcttgtaaagaatagcacttatgacgatgcacaaccaaaccttggcgagacaaatgcccaacaatggtatcgccataaatcggattgcagcagcgtgcaaaatccacctccacgcctttgatgcctgccagcagatgtttagagcgagtaatttcatggtcatcagccgtatcaatctcttcactaaataaacgagaaaccacaagctgtggcaatagcatgcctgttgatagttgcataaatagctcatcaggcgtattgataccacgccattttagaatatcagtccaatcatcatctgttaaatcagtgatacttttaccataagtgcttaaggcacggtctagtgcttgcttgccataatgaatcttttggtcttcaggcagatgctttagaaattttaaaatctcatttcgggctttgttggtagcgacaaagccgagccattcggcgcgtggtgtggcatttttatccgtgtcaatgctcacaatatcaccatcagccagcactagcccaagcttaccatgcttatgattaatgtcagcacccgtagcaatgttcccgatggcaggtccaaccgcataggcaaaatccaacgccgttgagccacgaggtagctcataggcacgaccctttgggctgtaacagacaatttttcgctcgtgcagatagctaattaactcctcaatgatgacaacatgggcatcatcaccctctgctttaccagcatttgccaaatcttgcatattccgaagactggcttgaatgactgactgactgacgccagctcggtcattactgatgatacccagccgagcagcctcttgcatgcggcgtgtcattaatgtaattttaatgtgattataatcacggtcataaaataaggttaaagactgattgccacctgctaaaggtttgcgaatgttatcatggatttggtgattgccaatttggtatttttgaatcaaataagtggccagcgtgtcgcaagcttcaatatcttttaagataacctcaaaatcatattggcgaattaattggctgatttgaccacgatttttaaaaaactgccgatacattgcagtacggttatcaaggacttgtacatgaccgtccaaattcagatgcgacagcagactttgtagataagtgctaatttcggttttttgaaaattacgccccaatccatgctgtaataatttatctgtaaatttgttgtacatatcagggtttaaattgcgatagcataatagctcaatataatctgcaatgctgttaagccccatcaggcgtgcaaaaggaatataaaaatccagtgtttctttggcggtgcgtttttgtttttcttcgctgacagcatcgagcgtggacatattatgcaagcggtcggatagcttgataatcaaaacccgtgggtcggataaggtggctgtcaagattttatgaaaagtggcggcttggctttgttgcttgctcatacctgaggatttaagcttagtcacgccatcaacaagttgagcgaccatttggccaaattcttgtgtgaccatctcatcggtcacctcggtatcttcgatggtgtcatgtaaaatggcagcaacgatggtgtcacgatctaagcgaaagcctgccaaaatctccgccacagcgatggggtgtgtgatataaggctcgccagattttcgtttgtctttgatgtgggcgacatccccaaaatggcaggcacgcaaaacatcggcacgctcatcaggctttagataggcgacggcacgcatcaggctgtcacgagcttcatccacaagcgggtggctaagattggtcggtgttgtaaggtcttggctgtctggcatagatggctcgtacaaattcactttgatcaatggctaaaaaatgacttggcttatttgggttaaccccgtaacttacgctctataataaagcactttgtaggggtgttgtcaatatctttaccattgaattgattaattttaagatttttataaatgaataagttgttatgaataaatatggcggatatgatatctctaaaatcagatgacaaatcaatataaatcaatatgaactaaaaaaagccatgaacaaatatggctcatggctttgggaacttaagcagattatagggtattgcccaactgctcaggtgtgatttcgtaggattgatttgactttggaaataagtcctcatcaggctcatctaagatcgcacggctgacatgacctgctgagatttcacgcaatgcaagtacagttggcttgtcgttatcaacggcgaccgttggctcaactttaccattggcaagttggcgggcgcgcttgcttgccaccaaaatcaactcaaaacgattatcgacattttctagacagtcttcgatggttactcgtgccatggatattctcttaaactaaatggtgaattttgtattatatcaagtttttttgggttttttaagtgccttttgatgatttttatcaattcatggataggttggcgtatcatcaaataatgcagcaatcaaagcagcatggcgagcctgctgtgcatgtagcgtcaggcggtggctcttaataatcgtttgtaaatcatctaacgccatctcaaagcgatcattaatcaccacataatcaaattgatcgtattggcgtatttcatccagtgagcctgccaagcgttttttgatgacctcttggctgtcttgaccacggtttgataatcgctctgccaacgcttggcgagtgggcggtaggataaaaatcatcaccgcttggtcaaattgtgctttgacctgtaatgcaccttgccaatcaatttccaagatgacatcaatcccttgggctaataaatctatgacggcttgttttgatgtgccataataatggtcaaatacttgggcatattctaaaaactcggatgcttgaattaatgactgaaagcttgcggtgtcaataaaatgatagtgtgtaccgttaatttcgcctgggcgaggttggcgtgtggtatgcgagatgctcacacataagcccttggtacatttgagcagttctttgaccagtgaggttttgcctgtgcctgatgcggcggtgatgataaaaagcgtgcctgccatgatatgaccttatcagtgataaattaccctattttagcatatttttgggataaaataatcgctttgatgggcagcttatcagcgaatgtatttggggtaacggctaggtttattggctaaaatttgctaaaatgggcggatattttgggaaataccgagtaacacgatgaaaatattattagccaatcctcgtggattttgtgcaggtgtggacagagcgattgcgattgtcaatgaagcactacgccgttttaatccgcccatttatgtccgtcatgaagttgttcataataaatttgtggttgaggatttggcacgccgaggtgcggtgtttgttgaagagctcgatgaagtgcctgatggggcgattgtcattttttcggcacatggggtttcaaaggcggttgaagatgaagcaaaacgccgtgatttgacggtatttgacgcaacttgtccactggttaccaaagtgcatattgaggtgggtaaatttgccaaagggggcatggacgccattcttatcgggcatgcaggacaccccgaggtagaagggacgatggggcgttttgataccagttttggcggtcgcattcatttggttgaagatgttgaggatgtggctaagcttgactttgagcgtgataagtcattggcatttgtcacacaaacaacgctatcaatggatgatactgccaatgtcattgatgcactcaaagaccgatttcccgccatcaacgcccccagaaaagatgacatttgttatgccacccaaaatcgccaagatgcggttaaattgctttctcgtcattgtgaggttgtgctggttgtgggcagcccaaactcgtcaaattctaatcgcctgcgtgagcttgccgagcgaatgggcaggcgggcgtatttgattgataatgctggtcagatgagccaagcatggtttgagggcgtgacatatgttggtgtaacagcaggggcatcagcacctgagatactcattcaagaagtgcttgatacactgcaattatggggggctgatgtgcctactgagctatcaggcatcgaagaaaatgttacttttagtttgccaaaatcactgactaaggcagtttgatggtgcgtcaagattcccaaaaaacactcacacttagcccaagattgaccgagccactcaatcaggcactgcgtgatcagctggactcatcaacacttgcacgagttttacaggctaggggtgtacacgatatcagccaaatagatacgcacatctgccagctgcttgcggcagcagatttgatgggtattgatacagcggttacgctcattgataccgccattgaccaaggtgagcgtattttaattgtcggtgattttgattgtgatggggcaaccagtacggcattgatggtgcgtgtcctgcgacaaatgggcgctttggtggattttttggtgcctgaccgatttaagttcggctatggactgacaccgcaaattgttgagcatggtgctgcattgtatcgcccaaacttaatcatcacggtggataatggcatctcaagccatgatggtgtggccactgcccatcagatggggatcaaggtggtgattaccgaccatcatttgaccaccaaaccatcaccgcctgccgatgctgtggtcaatcccaatcagttgggttgtcattttggtagtcgctatcttgttggtgtgggtgtggcgttttatgtgatgggcaggcttgccaagcatcgccgccaactgggcaaatccagtgccagcgtggctaagtatttagatttggttgctctaggcacagtcgcagaccttggtgtgctggataaaaataaccgcattttggtcacgcatgggctgcagctgatccgtcaaggtcgatgcgtcgtgggcattttagccatcttagagcaggcaggtaggcaacatcagaccatcaccagtgacgattttggatttgccatcgcacctaggattaatgccgctggacggatggataacatgcgtattggtgtggagtgtctacttactgatgattggggagaggcacaccgattggcaagtaagctaaaccagcttaatcaagcacgccgccatgttgagatgagcatgaaagatgatgccattgccattgtccaaagtttatctgagtttgatgagacaccgcctaaaggcattgtgctttatcaagatgactggcatcaaggggttatcggtattgttgcaggtcgcctaaaagaaaaattgtaccgtccaagcatcgtttttgcaccagcagataccgcattggtcggcaagtcagatgatatcaaaggctcagctcgttctattgcaggcatacatattcgtgatgtcattgaaagcgtggcattggctcatcctgatttgatcaagcattttggcggtcatgcaatggcagcaggcttgaccattcaaaaggctgattttgaacgatttaatcaagcactccaagcggtactgttggattttgatgatgatgtattttatgaacaaaaattcaccgatggagcgttattgcctgacgagtttagcctaagttttgtggatagattaaaaaacatcagcgtttggggcaatggttttgtaccgcctgtttttgatggcaagtttgaggtgattaaccatcgtatcttaaaagataaacatctaaaacttagcctaaaaatggcaggggtgcaatatccgattgatgcgatttggtttaattatcaagcggacagttgggattatcgagcgtttggcgtgcatattttgtatactttggatattaatgagtggcaaggcagccaaagtctgcagctggtgattaaggacttggcggtgatgagtgtggcggcattgtctgtttagcataaaatggatatgtttgggataaagggcaaatcttatcaagattttttaagctcaattgaaggtaagtgccaatcaaattttagtgccaacatgcgtatcccaaagatactgactaatgccagaccttgttttatccagtcagcaaatccccaaatttctaaaactaaatacaaagcagaaccgataatgctggcactgatataaatttctttttgtaaaaccaaaggaatttcgttacaaatcatatcacgcatgataccacctgcgatgcttgtcatcaccgccatcatcacggcaatcagtggatgggcatcaaacgataacgccaccgttaagccaatcacactaaacacagcaagaccaatggcatcaaaaaattttaaagcacggtcaatgtgtccaaggcgatgaaaaaacagttggcagataatggatgttgttgtaatgagtatgacataagttaaatcagtcatccaaaacagcggatgacggtctagtatgatatcacgcaggctaccgccaccaatggcattgaccattgaaactaagatacagccaaataaatcaaaccgcttatacattgccaaagttgtcgcagcgatggcacaggcactgataccaatcatatcaagtgagtaaatgagcagttgggtgggaaagttggttaagatatccatagtttgtcagagggtgtatttggtgctaggttaattaatggggcgtgcgtgcgttacagattggcagatggcaaggtgattaacggtatcatacagctcatattaccgtttatttgcccttagcatctgcccaaatgattttatgtagctgtaagccaaaccgaacgggcagagcgtcttttaaaatccattctgccaaatcggttgccagtttcggtgcgtggcttgtgttttcttggatgttaaacatgggtgatagccaaatcgtgccaactttatcatctaaagcgtgtttggtaatgatattttttgcccattcataatctgtgcggttggcaatgacgattttaatttggtcgtgcaaggtaagatgggctaaattttcccataagtttttatcagcctcgcctgatgatggtgattttagatccatgacttttgagaccaatggcggtacattagcaaccgataaagcacccgctgtctcaaggctaacctcataacccgactgtatcagtttatgcattaatgcaatggcatttggctgagccaaaggctcgccgcctgttacgcagacacgccagcaaggatattgggcaatatgcgtcatgatatcatcaagcccccaacgctcaccgcctgaaaaagaataggtcgtatcacaataatgacaacgcaaaggacagcctgttaggcgaataaaaattgttggtagcccagccgtcaacgcttcaccttgtagagaataaaaaatctctgtcagcttcagacctgcttgcggatcggtggttgggattttggtatttctaagggtgtctttggtcacgatgtttggctttttaagtgtcaagtggtgataaaatgcgatattgtaccaaacctctacataaatggcgaatggattatccatgatgcatgctgcttaaatggtacaaactggcttgatagaaaagttatcatctgcattttaaaaaattatcattgtcttgctatttaatttaaacaagcattgttatgacaaatatcaaagccagccacgcccaaatgatcgccattaaaaacaaaaggctttacatttttttataagcgtgtatcatatttagcaaaataaccgtaccaagtgatagttatttggtggttattttgtgtttagggcttatttgaattgccaagttattaaaatattaaaataagtacctaagccgtgttatcaaccaaaacccatatatcaaaacctatacaaaaagtatgggttttttcgtcaagcaattatgcttgttctttcaacccttatctgagatggtaatccgatatgagcgttcactctataaatcatgcccccacagcccccaaagatggtgcaaccaatgactactacttgacccgtcaaaatcagatggagtctaatgtcagaagctaccccagaaaactccccctagccatcgccaaagcccaaggctgttgggtgaccgatgtggagggtaatgagtatcttgactgtttggcaggtgctggcacattggcattaggtcataatcatcctgctaccataaacgctatcaaagatgtgttagacagcggtttgccattacacacccttgatatcaccacgccaattaaagatgcgtttaccgaaaaactgttgtcatttttccccaaggattttgtgctacaattttgtggcccgacaggggcggatggtacagaagctgccattaaacttgccaaaacttatacagggcgtgataatgtcatcgcatttagcggcggttatcatggcatgacacatggcgctcttgccatgacaggtaacttatccgccaaacaaaaggttggcaatctcatggcaggcgtacagtttttgccttatccgcatgagtatcgttgtccgttggggctgggcggtgaggctggtgtggatgccttgacttattattttgaaaacttcattgaagatgttgaaagtggcgtggttaagcctgccgctgtcatcttagaggctatccaaggcgagggcggtgtcgtccctgctcccaaaaaatggctgcaaaaggtgcgtgaagttaccgcccgccacgacattgtgcttatcctagatgaggtacaagcaggatttgcccgctctggtaaaatgttcgcctttgagcatgctgagattgtccctgatgtggtcgtcatgtcaaaagcggtgggcggcggcctaccccttgctgtgcttgccattaacaaaaaatttgacgcatggtcgccagcaggacatacaggcacattccgtggcaatcagcttgccatggcagcaggctataatgtattaacccaaatcagccaaaacaatttggcagacaatgcacgcattcaaggtgagtttttgcgcacagaactccaaaaaatcgcgagccagtacccttgtatcggtcatgtgcgtgggtgtggtctgatgatgggcattgagattgtggatgaacgccaagaagctgaccacatgggttcatatcctgccgacggtgagcttgccgccgccatccaaaaagcctgttttgataataaactgctgttggagcgtggtggtcgtggcggtacggtcgtgcgtcttttgtgtccgattaccatcactaccgacgagtgtgaacaggtcatcactcgctttaaaaaggcggtgggcgaagcggtgaaagcagtgcgtggctaatcgttgattatcataaaaataaaggcgtgccaatagcacgtctttttttataagacaaaccggctttatgtttatcaaactttatgtttatcaaaaaatttgttaaaataaaaattttacttgacactctgaatggaattttgcaaaatggaccaaccaaccaaccaaccaaccaaccaaccaaccaaccaaccaaccaaccaaccaaccaaccaaccaaccaaccaaccaacagcctaaaaactgcccataataccgacttttttggtgaaaaattagccaaaattcgccaaatcctgcctgaaatttttagcgaacacgctctagacttagaaaaactcaaaaccctgctgggcgaccaccttgcccaaaacgaacgctatggcttaaattgggcaggcaaatcaaccgcttatcaagccctacaagcccctaccaataacacgctcattccttgtcctgccgagagtgtggattttgataccacacaaaacatttttattgaaagtgataatttagaagccctaaaaatattacaaaaatcctatgcaggcaaaatcaaaatgatatacattgatccgccctataatacgggcaatgattttatttatcacgatgattttagccaaagcaaaaaagagtatgaaattgccacaggcgatagaaatatcaatggcgaattattaaaatcctttaaaaagaacagcaaagacaatgggcattatcattctaattggcttaatatgatgttgccacgattgcatttggctcatactttgctttctgatgatggcgtgatatttatcagtattgatgataatgaacaggctcaattaaaattattgtgtgatgaagtatttgggggagagaattttgttgccactcttccaagacaaacatcagctcaaagaccttcacaagaaaaatatatttctattacgcatgactatctattggtttatgctaaaaataaaaattatgattttaactctgtaattgaaagagatttgtcaaatatcaaaaaagatagtaacggaacatacatagaaggggatacaagccctattctagcatcatctactcaaggttattcggctggtggggattatgatattgaattcaatggaaaaatatttaagcctgaagatagtagagggaacagaagacgctggctttggacaaaagaaagaatgaatagggcgatagagttagggattattattgaaacaagaacaacattgcgtgttagaaattatattgataaagaatttcaagttgggacaaatattttagtggataaaaatccaaatttaattctcacttccaatgatttaattaatccaaattataccaatcacaaaggcacggcttgcttgcgagatttattgctagaaaattattttgatttttcaaaaccattagatttaatcaaaattttagcaaaattactaaatggcgacaactccattatcctagacttttttgcaggttcggcaaccaccgcccacgctgtcatgcaattaaacacagaagataatggcaatcgacaatttataatggtgcaattaccagaattaaccgatgaaaaaagcgaagcctataaagctggatttaaaaccatcagcgaaatatccaaagaacgcattcgccgtgcaggagcaaaaatcaaagccgaaaatcccgataaaacccttgatacaggatttaaggtatttaaattaagtgatagtaattttaaagcgtggcaaattgacgatgatgatattgccaagcaattagaaatgtatattgaccccttaaaagataatgccaatgagatagatattatctatgaactgttattaaaaatgggattaaaattaacggcggatattaaatttgataacggcgtttattggctaacttgtgaaaataaatcgtacgccattgtgctaaattcattatcccaagatgagtttaacgccattattgccaaaaaacccgccaaaaccgttgtattggacaaagcatttttaaatgacagcgaaaaatccaatataattttgcaatttaaagatgctggactaaattttgaaagtatttaatcaggggaaataagaatgcagctcaaatacgaacatctggattatcaaaaacaggcgattgatagtatcgtagatttatttcaaggcgaaattacgcatcatcaagatgattttagcttgtcggacaaagacaatatgcgtgtgattgccaatgaattatctttatccaaagatgatatttttaataatttaaaaaatatccaaacgcaaaatcagctttctttatctgataaattggataatttgtattttagtgtagaaatggaaacgggtacgggcaaaacttttgtttatttaaataccatttttgagctttatcaacgctatggctggcgaaaatttatcattgttgtgccaagtgtcgccattcgtgaaggtgtattacaaactttaaatagcacaaaagcccattttaaagatgaatttaattcgccaatttatcattatggtgaatatagcggtcaaaaaaccaatgcattaaaacattttgcgacaagtacaaatattgaaattttggtgatgaacattcaatcttttgaaaaagaaagcaatatcattaatcaacagcgagaaaatggcgtattaatggagttaatccaagcaacgaatccaatcattattattgatgaaccacaaaatatcagcagtgataaacgcaaaaatgccattgaaaatttaaatccattatttacggttggatattcggcaacgcataaagaaattatcaataaagtatacagcctaaatcctgtacaggcatttgaaaaaaatttggtaaaacaaattgtcgttaattcggtgatatcacaagataaaaataatgcctttattgaactaaaagaaatcacaaacaaaagcggtttgaaagccaaaataatatttgatattagcgaaaaacagcaattaaaacgcaaagcaattaccgttaagctgggcgatgatttatatgaaaaatcaaagcaaaaccccgactatcaaggatttataattacaggcattgatttagaaaaccaaatgattaaattctctaatggtatcgaaattgcccgtggtgtaaatatggattgtcttagagatgaaataatgaaacagcagattcattatactattaaagagcatttaaagcatgaaaaggagttaaataaagacggcataaaagtattatcactgttttttattgacaaggtagaaaattatcgcaccaatgcacaaggtgaattggggaaattttatgagtggtttgaagaattgtacgaattagaaaccaaacaatcagctagtggcgtacataaaggctattttagccaagacaaaaaaggcaatgctaaaaacagcaatggtaccaccaaagatgataatgatgcctatgagctgattatgaaagataaagagcggttattgtcgcttgatgagcctgtgcgatttatttttagtcattcggcattaaaagaggggtgggataatcccaatgtttttcaaatttgtactttgaatgaaaccacatctgtaattaaaaaacgccaagaaattgggcgtggacttcgtttacctgtgaatcaaaaaggcgagcgaatttatgatgaaaaagtcaatattttgaccgtgattcccaatgaaagttatgagcaatttgccaacagtttgcaacaagaatatattgatgattgtggcattaaatttgaaaaatctcatcttaaaaatgccaaaaatgaacgcacggtaacttatcgttttgatgcgtttaccgacccattatttttacaaatttgggagcgtattcgccataaaaccagctaccgtgtacaatttgatagcgatgaattgattgacaatgccagtcaaaaaatccatgtcatgccaaaaattgacacaccaaaaattgaaattaaaaaagcaaggatggtgcaaaacagtgaaacaggcatagaaacgcaagagattttttctcaaagtgaacatattcaaacgaagtttgtgatacctgatattttaaaagtattgcaacaaaaaataggtttaactcgcaatacattggtacagattttacagcaatctggtagaattgatgaagttaagagcaatccacaacgctttattgaaactgtagcagaaatcatcaatgatgaattgtacgatttgatgaagaatggtatctattatcaaaaattggataaagtgtacgaacaaagtttatttaagacttataaaatttatgccaatcaatatacttttaatgtaaataaaatggataaaaccatttataatggtgtgttggatttagattcaaataccgaaaatcaatttgcaacagattgtgaaaattatgatgagcaagtggcattttattttaaattacccaaaaaatttaaaatcccaacgccgattggtaattacaacccagattgggcggtggttataaaaaagaatggcgagcaggtttattttattgctgaaaccaaaaatacaggcgataaatccattcaagatggggtggtggttgataaattgaagtgggaagagcggtttaaaattgcgtgtgcaaaacgattttttgaaataaatgatgaagtggattatcaagtggtacaaaagatcaatgaattgacctaaaataatattaaacgatgtaaatatgttaaaatagaaaaattctttacttttaggacatagccatgccaacttttgaacaacataaacaagccctactgtgcaacgacccacaatccatcgccgattatgaacgcacgatgacgcacgccgtccaagcggtcaagacatggctacaagatgataacatgtacacaggtggcagcatcagccagttgcgttcacagattgcttttaatccaaccaaagacggcttaggcattgatggggcgttagagcgtgcgataaatctgtttttaaacaacagcctaaaggtgcatcatccgcattcgcttgcccatttgcattgcccaaccatggtaacatcacaaatcgccgagatactcattaacgccaccaaccaatcaatggactcatgggaccagtcgccagcaggttcgctcatggaggttttgctcattgactggttacgccaaaaggtgggttatggggcagggcgggcaggcgtgttcacatcaggcggtacacagtccaacctgatgggcgtgcttttggctcgtgattggtgcattgccaaacattataccgataaagacggcaaaccgtggtcggtacagcgtgatggtatcccccccgatgccatgcaaaatgtcaaagtactgtgctcccaaaatgcccattttagcgtacaaaaaaatatggcgatgatgggcatgggttttgcttcggttgtaagcatccctgtcaatgacaatgcccaaatggatacccaagctttggccgatattatggcagatttgcacgctgatggtaacatcgtggcgtgtgttgtggcaacggcagggacaaccgacgcaggggcgattgacgacattaaagccatccgtgccttgtgcgataaattcggtgcgtggttacatgtagatgcggcgtggggcggggcgttattactgtctaatgattatcgttctatgctggacggcattcatctgaccgattcggtgacgctggattttcataagcactattttcaaagcatctcttgtggggcgttcttgctaaaagatgagcaaaattaccgctttatgcactatgaggcggagtatctcaactcagcctatgatgaagagcatggcgtgccaaatctggtctcaaaatccttgcaaaccacacgccgatttgatgccctaaaactgtggctgacgatagaggcgttgggcgaagagctgtacggctctatgattgaccatggggtaaacttaacaaaacaagtggcggattatatccgtcatgctgatgggctagaattgctcgttgaaccgcagtttgcttctgtgctgtttcgtgtcgtgccaaagggttatcctgatgagtatttggacagcctaaaccaaaatgtggcagatgagttatttgcccgaggggaagcgaacattggcgtaactcgtgtcattgacagccgtcaagatgtgcagtcgttaaagatgacgacacttagccccatcgcaacgcttgaagatgtcaaagccttgctggatcaagtattagcagaggcacacagaattggcgatgccatcaaagacggcacttatacgccgcccattgggtgagttgggtgtttttgttttgaatgaataaaagtaaacaaaagccgctttgatcaatcagcggctttttattattcattattcatgcaatgccttataaatcgtaccagccagcatgggcccaatgcctttgacctgtgcgatctcatcttgtgatgcaccaagcagctgttgtataccgccaaaatgatttaataaatcacgcctgcggacttgcccaagccctgggataacctcaagcactgagcttgagcgttttttatctctttttttgcggtgggcggtgatggcaaatcgatgcgcttcatctcgaatttgcatgatgagatgcaaagccttgctatcagcaggcaaatctatcggctcatgtgccacaaaatgtagtacctcaagaccagctttacgcccctcaccttttgccacaccgacaagcaaagtatcggttaatttgccaagctcgcttaatacttcgatggcaacatttaattgacccttgccaccatcaatcaataataaatcaggtaacggatgtttggtatagcgacgcattaagacctgacgcatggccgcataatcatcgcctgcggtaatatcatgaatggcatattgacgataatcacgcttttttgggccattttggtcaaacaccacacatgagccgatggcagcttcgcccatggtgtggctgatgtcaaaacattcaatacggtcaatggtgcaagtggtgatgggggcaagcacttgttttaactgctcaaatcgtgcttgtagctcccgactgtctttgagcttggctgataacgcattattggcatttaagtttgcgatggataaccaatcatcacggtgtgtggttactttgtgcttaatcgtggtgcgtttgccaaactgtacttgcaaaatatctgccaatatagatgcctcttcaatagcaacagagctgataatttcatcaggcaaatcatcactcacctgaaaataaaacgacaataaaaattcttttaaacgctcttggttgctcttaatggctggttcgatatcatcaggaaaatagttttttacccccaatacctgaccgcctcgcaccgtcaaaacacacacggcaaccgcaccagcatcagcagcaatggcaaagacatccgcttcaccctgtaggcgaaatactgcctgtttggcttgtaaatcgctaatcatggcaagccgatctcgataaaaggcggcttgttcaaagtttaatgccgcagcagcttcctccatttttttgaccaaaatggcttgcacttcatgagaatgcccctgtaaaaatgccaaagcagcacgcacatcggactggtattgttcggcagaaaccataccaacgcagggcgctttacaccgtttaatttggtattctagacaaggacgctgcctttgtgcaaaaaaactgttcgtacagcttctaatcataaataatcgctgcatcagctgtactgattctttggcattgcgtgccgatggataaggaccaaaaaaacgcccttgagtataccgacctttaccacgaccaatggacagtctgggaaatttatccgtactgatatagatgtatagataagatttatcatctcttagtaggacattataaggcggtcgatggtttttgatgagattttgctcgagtaataacgcttcggtttcgccacgggtgatgataatctcaatctgttcaatgcgttgtaccagtgcttgggtttttgggtgttcgatggttttggcaaaatagctaccaacacgattttttagtgattttgctttaccaacatataaaatctcgcctgatttacccagcattttataaatgcctggacgattgggtagggcgttggcgtgttgttttagtcgctgtcttttttgtgttgggctttcagcttgggggtgtgttgttgtcatgatatgaatatcaatttaagtaatgaataacattaagaagcttaagataaaaagagcgttaagataaagcgggattgagtgaactttattgtaaaatatgattcattaaagtatcaaaatcatcaaacgcagcatcagggtttgctaaatcaattttttcaccataattatagccataacgcacagcaagcgtagttatgccagcggcttgccctgataaaatatcatttttggaatcaccaaccataatggcatcagtcggtgcgatgcccagtgattgacacaggtataataaaggcgttgggtcgggctttttgacgctgagcgtatcaccgccaatcacttggtcaaacagtgtcagccatccaaaatgtgataaaattttaggcaaataacgctcaggcttattggtacaaattgccaaataaaaccccgctgcttttaatcgttcaagcccttgtataacccctgcatagctttgcgtattttcaattgttttatgggcatattctgccaaaaataactcatgggcatggtgaatcatagtcgtatcatagatatgatgtgcttgcattgctcgctcaaccaattttagcgaaccattgcccacccagcttttgatgatatcaattggcataggcggtaagttaagcttggcatacatgccattgaccgccgccgccaaatcaggggcactatcgataagcgtaccatccaaatcaaatataatcagttttttgccagtcattgacagtgtttgcatgctttttccttattcttaaaattggcggctgtttggtattttttaaatcagtcaatttttaccatttgtcatataatgacaaagtacaaatttagcaatattttagtgcattttttggcgaagttttatgaaaactggtcattggttgcaaaactttacacagtacctataaaacttgcacagttaataagaaatattttgttactataggggcgtcatttggaacaagacagttatttgtaaatagttatttgcaaaagacggctaaaagacagaacagcgtttgtttcagtgattaactaggagaaaaacaatgaaaactttaaaaacactattggcagtatcagcttcttcgttattggcgatgagtgctaacgctgccatcagctatggcaattctgctgatgcccaaccttatgttggtgccaaaattggtcaagtagatgccaagcaaatcaacggtaaaaataccgcttatggtatttatgcaggttataactttgaccaaaattttggcgtagaagccgaatttgttggttcagacgccaaagaatttaatgcaggtatgagtcctgtaaaaggtgatgtgaagtcttttggtgcttatggcacatatcgctataacttcatcaataccccattttatgccaagggcaaattgggcattgctaagactaaagtagatgttaccagccgtaatgcaactacatactcaaacaaaagcgacaaaaccagcctagcaggcggtgttggtgttggctttaaaccattagcaaatgtgggcgttgaagcaagctacaactatctatcagaagatgccaatgcaattagtttgggcgctcatttggctttctaattgccaattgcttgaacaacataaaaaagatcctcgaattgagggtcttttttattggtcagtttatccgtaagataagccatcatgataaattatctttgcttaaatgatggccaaagtgtggcgatgttttaaaggggtgttatcccaatgctcaatggcatggcgaagaatctcatgcggtttggcggcatgcatttgtttgacggtgtgttgacctaatagctttagtgcgtataaaagcatttcactgggcttggttgtattgattggtgtggcaagattttgtttggatagcttttgcccatctgtattcatcagtaatggcaaatgataaaaatagctcggtattggtaggcgacatttatgtaaaatattaatttgagcgactgtcatgggcataatatccagtccacgcatgatgtgagtgatattttgcaagccatcatcaatggcacaagccaaaatataattaatcatttggttttggcgtttgaccacaacatcaccaaggcttaacgcaggattatcccaaatcacgccttgtagctcatctacaaatgctgtctcaacattgggcagctgtaagcgaattttacttttggggtgagatttatccaaatctttatgtaggcaaaagcgtgggtagagggttggctggttgagtgcgtggggcttagcgttttgatttcggtgtgcctcaagttgttttcttgagcattggcaggcataagtgatgtcagataatcgattggataaaatctcatcataaatatctgtgcgtttagattggtaggtaacttctttgtcccaatgtaacccaagcttatccaaatcatgtaaaatgctgtctgtatacttaggctgacaacgctcaaaatccacatcttcgatgcgtaacagccaatcaccacctaatgatttgatatgacaaaagctcgctaccgccgtggtcagcgagcctaaatgcagatggtgtgtaggcgagggtgcaaatcgcccaatgggtctagatatcaatgggctattgaccgtgattttgtctttctttaatttcagacagtgtcttacagtcgatgcattgtgtcgccgttgggcgtgcttctaggcgacgcagaccaatttctgtaccacatgtctcacaatagccataatctaaggtctcaatgtcagccaaagatttgtcaattttgcggataagcttacgctcacggtcacgggtacgcagtgccaatgcaaactcctcttcttgagtcgctcggtcgttaatatctggcatggtgttggtttcttcgtgaatataagtctttgtgcgttcagcttctgtaattaattcttcacgccagttttttaagatggtgcgaaaatgtgctaactgtgcatcagacatatagtcttcgccttcagtaggttgataaggggtaaaggtggctgcgttcatcatcccgttcatccttatgggtgcaagtattcatgataaaacaaagcttgcaggctattaaactgcctttcggcaaaaaaaattgcggttactatatcaaaagatgattaaaatagctaatattaatttgcattattaagacaaaatgaatgcgtattttgcacaatttgtatgtaacttgatacgatgcctttgttgtcaatctgtatcatacggcagccagcaggcgtgtcagcaatttgaaaattatccacaaaaggcatgaattgacggtctgttgaagggcagcttagcaactgaacctgatgtgctggtagtggatgcagcgtatgtacttgatgtacatgtccgcacaaaatcgtgtgaacatgagcgtgttttttaatcacgcaccaaaaatcttgatgatttttgagtagatgagcatctatccaatctgaactgacctttgtggggtggtggtgtagggcgatgatggtttgttcagagtgagtggttaaagtttgatcaagccaaagtagtgtttcatgagttaataacccaaatatttcgcctgatacactggaatttagtaataaaatttgccaatcatgccctgcttgaaaagtataccgaaagcaattttttaggcgtcgatcgggtaaaatcggcacatgtatccgctcttggtgtgccaaatgaatgccaatttcgtgtgtcacatcatgattgccagcgacagccaaatagggtattttggttgcttgtagctgattaaataaccaatcataagcatcgctattaccatcattcaccaaatcacctgtcaaaagccataaatccgggtttagatgctttgctgtctgaaaaactgccaaaaatcgctgataactgggggcttgaccaatgtcccccgtcaggtgtagatcggataattgaacgatattaaaggtatggttgttggtgatgttaggcatatttgcttaggatttttttgcaggcaaaggtaataaaaaaaccaatggcaagcatgagtacgatggataagcctgtttgaatgtcaagccacacactcccccaaacccctgcggtaacagccatttgggcaaatatgatggataaaaataccatcatcgttggcgattgtgcaaacaaacgggcaatcaaggcaggtaatatgagaagtccgctgattaatagactgccaaccgcctgaagtgccacagcacaaaatcccgccaaaagccccataaaaaataggtgttggtgtaatgggttaatgccctgaatttgggcaagtgcttcagaggttgccagcttaacctgagattgccaaatgcgttttaaaatgaccaagcccattgcaattagtatacccagtcttggtaaatccgaccaatccatatcaagcaagctaccaaacaaaaatccaagcacatttgcttgttgctgggttagctgagtgagtgtcagtaaccccaaacaaagtagcgtagacgctaacactgccaaggtggcatcattgggcaatcttttatctttgagcaaggttaaagcgatgatgacggcaatgctaatcataccaatgcccaaatcagcaggcaggtttagccatacggcaaacgctataccgagcaatgcaccatgtgccaaagtatccgaaaaaaaagccatacgccgccacaagactaggcatcctaagggtgcggataataatgcaatcaagacaccagcaatccaagcaggtgcgataattggtagccagtcactcatgcggtgtctcgatgtctatggttgctctcaagatgctcatgatccagatgatgatcgcagtgtgtatgttgatggatgtaaggtgcttgatagccaaaaagttgtacaaattcaggtgcgattgcaatttgacttggcacaccttgacagcagatgtgtttatttaagcagatgacacggcgagagcctttcatgacccaatgcaaatcgtgtgataccacaagcatcgcacattgtaaaaactcaggcagctgatctaaaaactgatacaaccagctttcactttctggatctagcccttgcatgggttcatcaaggattaatagttcaggtttatctaataaggcgcgcacaagtagcacacgctgcgtctcgccacctgataaatgatgcatctgtttggataataacgatgttatcgataacttgtcaaaaatatcatctttttgagcttgatttaatcgctttggattggcctgtctgagcaaatctatggcacgcaagggcaatatggttggtatgttaaagcgttgaggcacatagctgatatgtcgcacttttttggtgattttaccgtgagttggagttaataagcccaagataagcttaactaaggtggacttgcctgcaccatttggaccgattaagctaatcatctcgcctgcatgaatattcaggctgacaccactcaccaaatcgccatcgctcacacgatagctgacttggtctaattgtaggatgataggcgtattatggcttttggtggcaatcacggcacacgcctttaagctctatggtgctacgctcaaccaaaaagtttgcatctttggcggcaaaattcatcatactatcaacaggaagattgctacattcttccactttttgacagcatcggcagatcaaaaatgcggctgcgtgccgatctctggggtggcaacaagggacataagcattcatggaacttaactggtgaatcaacccttcttcaatcaaaaattccaatgagcggtacacggttggcggtgcgatattggttttttttgcatttgcatcagataagcggctttgttgaagtgcgctgattaagtcatatgcacccatgggtttttctgcttgcaaaattagctgaaagacctcttcacgcagtggcgtaaatctggcgcctcgtttggcacagtaggcttttgcatcagccaagcgctgctcgggattttgatgataactatcatgatgatagctatggcagtgatgatgagctgaatgcataacaaccttttaaaattgggtaattaatcaataattatcagtgatatccgattatgggtatccaataatccaatcactgtgggagattgatttagtccatacattgataaatttaaccgttgattgacgattgactttatttttatcagttatattatagcagtagcagtaattatcaatcaagaccatcattttaagttatattacaaacaaaaccaagttattatccaatttttatggcaagtcttatgttataaaataacatttttatgacagctgtgctataattttaatcatttttagacatcagggtacttatcaatgacaacatttgcattacgaacgctttttaaaagctctgttttgtatcaatctttaaaagctgtgatcctattacccatcaccacgattttttcagtatctgcgatggctggcatggtcagcgttagtaattatccgcttgcacttttaagccatgaagttacccaaggtcagcatgatgccaaagtgctgcttaccgctggagatgttgggcatcatggctcactctcaccaagtaaagtcaaattggttgaagacagtgattatgtcatttggtttggtgaatcgcttgaacaaaatttggtcaaaacattggcagatgcaccgaatgcaatttcattattacagtttaacgccttcaaccgcctgcctttaaggcatattgatggcagccaaaaaccagattcagaagatgcacatatttggcttgatccagaaaatgctaaagccattgtgcgtgcgttgtctgtggtgcatggtcatgccaatccagagcataaagccaaatatgcccaaaatgccacagattttgagcggcgtatggataaagccgtccaaagcgtacaggtcaatggcatgacaccatattgggcgtatcatgatgcttttcagtatatcgaacaggcggcaggactgaaatttgcaggggctttgacgcctgatcatcacttaaacccaaaagccagccaatttaagcgactgaatcaaacaagaccgcagccatttatgtgccttgcgtctcaaggggtggtctcagacggcattaaaaataaacttggtaatgtcaatgtgactattattcaagaggacatgagtggcatgggtgaagattttatcagtgcatgggtggcacaggtgaatgcactgcaaacatgtgctggcatcaaataattcttgcttcgtgtcagatggctctttataatcaagccttttaatcaaaatcaaaatcatgaagcttatgagccgtcctgcccagcgtaataaaaaatctgccatctatcaagtccaaatgcgtcaaatttgggtcgttttgggcgtcatgatatttggcttggtactcagttatgtgatggcagatggcgataggctgattgccaaaggtttgtcgattggtgctttgattgcctttattggacagttgatttttactcgcatcgcttaccacactgtgggtgctaagcacgctcgtcaaatcatgctgaatacttatttgggctttgtgatcaaatgggcgacgaccttagctttatttgcttttgtgttcttaaagattcaaccaatcagcacagtttcggttatcataggatatatcatcttgattatcagccaaaatttggtcttgatcaagatgaaataatttgcccataaaatccccacttgcatcatttgtatcagaattatcaatcaatcaacccataaagaccatgtatcttagatagaaaagcgagtaatgtatcagtagcttttgtgaaacattggattattttaaaatattagtaatattagctatcattgataaaactcttgaaaatagtttgataacaaattgtttactcttaagaaaatcataaaattatgcaattttcccataaatttgtaaaatttcggcaataaaatggtgatttggtctttacatattgccaacactaaagtaagatactctattagttacaagtacaatttattgttatgaatttcataagtatttatgaaattcattgattttttaaatcaatgcaaaagtatggattttgtcgaaattaatggacaagggaagtacggttgataaaatattaatcagccaagctgctaacaatggattgaaaagagttaaatggtaacttcgttttttgatttggcgtttatcaccaatttttcttttttgagttaaaataagaagcttatttatggcagccgaacagacatctacagaatatattgctcaccatttgaccaattggacatttggacaccaccctgaattgggctggaaagtggctcatgatgccgctgaagctcagcagatgggatttatggcgatccatgtggactccatgctttggtcaattggtttgggtattttctttttggcgcttttttgggcggttggtcgtaaagcgacttcaggcgttccaactaagctacaagcttttgttgagatgattgttgatttcgtagacaacagtgttcgtgagtcttacaatggtccatcaaagctgatagcaccgctgtcattgacgatttttgtgtggatttttttgatgaacttaatggatttggtgcctattgactggataccaagcctggctcaatgggtaggttcattaatgggtcatgatccacatcatgtatatttcaaaattgtaccaaccacagacccaaatattactttgggtatggcgattggcgtatttttcttaatcattggttttggtttgaaatataaaggcgttggtggctttattgcagaatttacattgcatccttttagtgcaaaaaatccaattttgcaagctatcttaatcccaattaacctagtgcttgaaattgttaccttattagcaaaaccaatctcattgggactgcgtctatttggtaacatgtacgcaggtgagcttattttcatcttgattgcactgatgccattttggattcagtgggcactgagcgtgccttgggcaatcttccatattctagttattactcttcaggcgttcgtgtttatgatgttgacgattgtatacttgtcattaatctcagcagaatccgaacattaatttgaaccttttttaataacccttgattttaggtcataaggagacatcatggatccagtaatcgcacagtacacactacttgcagtagctctactaatcggtgcaggtgcactagcaacaggtattggttttgctatcctaggcggtaaattcctagaaagtaccgctcgtcaacctgagcttggttcacaactacagaccaaaatgttcatcgttgcaggtctgcttgacgctgtaccaatgattggtgttggtatcgcaatgcttctattgttcgccaacccattcgcataagctgaaaccgtcagtttaacgaccacctttgggtcttagaaacaaaggtgggcatcacctgactttcactaacaacgaggtgattggatgatcaatttaaccattttcggtcagctgattgcttttgcaatctttgtgctattttgcatgaagtttgtatggccaccactgatcggcgcgattaatgagcgtcaacgcaaaatcgaagaaggcttaaatgccgcagaaaaagcaaaagcggatttggtttctgctgaaaagcaagtagaggcagaatttgcagctgctaaaaccgaagctgcatctatcattgagcgtgcgaataaaaccgctaaccaaatgattgaagatgctaaagaacaagctcgccttgaaggcgaacgcatcatcgttgcagctcatgcagctgtagagcaagaagctgcccaaactcgtgaacaacttcgctcacaggttgccagtcttgctgtactgggtgccgaaaagattttgcaagacaaaatcaatgaacaagaacacgccagcatgcttgaacagttggcggctaagctgtaattagaggatatcatggctgaacttactaccttagctagaccatatgccaaagcagcatttgattacgctaaagagcataatgcgatcagcaattgggaagcttttttgttgattgcaagcgatgttgtacgcaatgaagattttgcttcactgctgaacaatccagccatttctgcacaacaaaaagcagatattctgatggatgcctatggcaaattaacagcagagcaagcatcacaagcgttaaccaactttataaaacagttggcagagcatgacagattggcgcttatgcctgagatcactgctcattacaccaagctaaaatcacaagagcttaaacaggttgatgcttatgtaacttcagcctttccactaaccgaagctcaaagtaaaaagcttcaagagcgattagcactttcaacaggttctatcgtgattttgcacgaatctgtagacccaaatttgttgggtggagctacgatcaaggtgggtgacaagtttactgatggctcagtgcgtggcaagttaaaacaattaaagactcagctaactgcgtaagtagtcagctgtctaaatcaaaggaaacaaggcaatgcaacaattgaatccagccgaaatcagcaatctgattaagcagcgtattcaagaccttgacgtaagcgcaactgcaaaaactgaaggcgttatcgtcagtgtctctgatggtattgtgcaaatccatggcctagaagaagctatgtatggcgagatgatcgagtttgaaggcggtgtgtatggtatggcactaaaccttgaacaagattcagtcggtgcagttgtactgggtgaatatctgtccctacaagaaggtcaaaaagcatattgcacaggtcgtattttggaagtacccgtaggtcctgaactacttggtcgtgtcgtcgatgcattgggtaacccaatcgatggcaaaggtcctattaatgccaagttgaccgataaagttgaaaaaatcgctcctggtgttatcgctcgtcagtctgttgatgagcctgtcatgactggttataaagcagttgataccatgattcctattgggcgtggtcagcgtgagcttatcattggcgaccgtcaaactggtaaaaccgctttggcaatcgatgcgattattgctcagaaaaactcaggcattaagtgcgtgtatgttgctattggtcaaaaacgctcaaccattgcaaatgtggtgcgtaaattagaagaaacaggcgcattggcttatacgactgttgttgttgcgtctgcctctgagccagcagcattacaatatatcgctccatattctggttgtacgatgggtgagtacttccgtgatcgtggtgaagatgccttgattgtttatgacgacctatcaaaacaagctgtcgcttatcgtcagatttccttgctattacgccgtccaccagggcgtgaagcataccctggtgatgtattttatctacactcacgcctgttagagcgtgcatctcgtgtcaatgctgactatgtagaagcatttaccaatggcgaggttaaaggtaaaactggatctttgacagcattgcccatcattgagactcaagcaggggatgtatcagcattcgtacctactaatgtgatctcaattaccgatggtcagattttcttagagtctaatctatttaactcaggtattcgccctgcggtaaacgctggtatctcagtatctcgtgtgggtggtgcagctcagaccaaaatcatcaaaaagctctcaggtggtatccgtacagcacttgctcagtatcgtgaacttgctgcgtttgcccagtttgcctctgatttggatgatgcaaccaaacaacagttggaacatggtgtgcgtgtgactgagctgatgaagcaaaagcaatacgcaccgatgtctattgctgatcaagcggcagttatctacgcctcaaatgaaggctatttgtctgatgtacctgtagaaaaaattggtgcatttgaagaggctttcttacgctacctacgcaacgatcatgctgcattgatgagtgaaattgatgaaactgccaactataatgatgacatcgaaagtcgtctaaaagctgcagttgagtcatttaaagcatcagcaagctactgattgtagcaaagaaatatggtgtgttaagcgttggttttaatgcaccataaacccttttataataagtccagtattggaataattatggcaagcttaaaagaaattcgtgctaaagtaaccagcattaaaagtacgcaaaagattacgcgtgcaatgcagatggtggctgccagtaagatgcgtcgtgcccaagagagaatggaattgggtcgtccttattcagatggtatacgccgtgtcatttcacatttggtgcaagcgcaatcagattataagcatccctatatgattaaccgtccggtcaatcgtgttggttttgtggttgtaacttctgaccgtggtttggcaggtggtttgaacatcaatctattcaaaaacttgttaaaaacagtcaaaagctatcaagagcagtcagttgaaattgaatttgcagtaataggtgcaaaaggcgtgggcttttttaagaactttggcggtagagtaacctcagctgtcactgactatggcgataaccctgcacttgagcaaattaatacaccagttcaaaccatgcttgatgattatctcaatggaaaattagatcgcatttacttggtgtataaccagtttatcaatgctatggctcaaaaacccgtggttgaacagattgtaccattggcagagagtgagtttgatgacactgagcttcaggcacacagttgggattatatttatgagccagacaccaaaacgctcattgatagcctactattgcgttacattgaatctgtagtctaccaatccgttcgagagaatattgcctctgaacagtcagcccgtatggtggcgatgaaagcagcgacagataatgctggtaacttaattaaagatttacaattggtttataataagctcagacaggcagcgattacacgagaaatctcggaaatcgttggtggtgctgccgctgtttcttagggaatcatttaaggcgtttaatatgttaaatcatcatattcgcctgactatttccgctttactgacggcacttttggtaacaggttgtgtttctactggtaatgttgcaatgaaagagcaaaaccaacaaaccattgagcagaccatcattaagggcaagaccaataagcaagagatttctagtagatttggttctgctgatagcatctcttttatgatagtggtaataaaatttggacataccgccatactcgctccaaaccgatggcaagaaattttatcccttataatttcttttctttgggtgaaaccatacagaccaaagaacttgtcattttatttgacagcaaaggcatagtttcaaattatacttttagagaaaccgccaaccaatccaaagctggtttggcagaataaaaaacaagataagcaagcaggagaacgcaatgagcggtcgtattgtacagattattggtgcggtaattgatgttgagtttagccgtggcgatgtcccccaaatctttgatgcacttcatgttgatggtactgaaaccacccttgaagtccaacaacagttaggtgatggtgtggtgcgtaccattgccatgggttctaccgaaggcttaaagcgtggcttgcctgtctctaattcaggtgcacccatttcggtaccagtcggtcaagcaacactgggtcgcattatggatgtcctaggtcgcccaatcgatgaagcaggtccggtaaatgctgaacaaaaatggtccattcatcgtgaagcaccaagttatgatgaacagtcaaatagtacagaacttttagaaacaggcatcaaagtgattgatttgctttgtccatttgccaaaggtggtaaagtcggtctgttcggtggtgctggtgttggtaagaccgttaacatgatggagcttatcaataatatcgccctaaaacactcaggtctgtcggtttttgctggtgtgggtgagcgtactcgtgagggtaatgacttctaccatgaaatgcaagaagcaggcgttgttaataccgaagattttactcagtcaaaagttgccatggtttatggtcagatgaatgagccaccaggaaaccgtctgcgtgttgccttaactggtttgaccatggcagagtatttccgtgatgaaaaagacgaagcaacgggcaaaggccgtgatgttctgctgttcgttgataatatttatcgttacacattggcaggtactgaggtatcagcacttttaggtcgtatgccatctgcggtaggttatcagccgactttggccgaagagatgggcttgctacaagagcgtatcacctccacccaatcaggctcaattacatctgtgcaggcggtttatgtaccagcagatgacttgactgacccatcacctgcaacgactttcgctcacttagatgcaacggttgtactaagccgtgatattgcatcacaaggcatttatcctgcggttgacccactagactcaacatctcgtcagttagacccacaggttattggtgaggagcattacagcgtagcgcgtggcgtgcaagaggtgctacaacgctacaaagagctaaaagacatcatcgccatcttgggtatggatgaattgtcagaagaggataaactggtggtttatcgtgctcgtaaaatccagcgtttcttgtctcagccattccatgtggcagaagtgttcacaggggcacctggtaaatatgtggcattgcgtgataccatcgctggctttaaagcaatcatcaatggtgagtatgacgatctaccagagcaagcattctatatggttggcggtattgacgaagttgttgctaaagctgaaaaattaaaagcataaactgacgcagccacagtcaggtagggatttggctgtggcatgatctaacgactgctggtctattgggagaatgatatggcaacttttaagtgccgagtggtaagtgctagagaagagatatatgtcggtgatattagtatgttgattgcaaatggtcactctggcgaaattggcattctggcgggtcatacaccattgattactttgctaaaaccaggtcctatgcgtatgaaatctgccgatggatcaagcgaagaggtggtttatgtgtcaggtggcgtactcgaggtacagcctcatgttgtgacagttttggctgattctgccgaacgagcatatgatttggatgaagcaaaaattgccgaagctcgtcgcaatgctgagcaggctttggcaaatcaaagtgccaatattgacacaactgctgctctaaccgcattggcagaatcattagcacagttacaaaccattcaaaaatacaaaaatcgtgcttaagatgattgacatgattaaatcatgataaaataaaatcagtttaggttattgtggcgatcacatcactttaggataattatgactactgaaaaagaaaacatgcctagaatcttaatcgtcgaagatgatgaaagattggcaatgctgacacaagattatttacgaaaaaatgggcttgatgtggctattgagactgatggtgctcgtgccattcgtcgcattatcggtgagcagcctgatttggttgtgcttgatgtcatgctgcctggaagtgatggtttggcggtttgtcgtgaagttcgtgcacattatcagcagcctatcttgatgttgactgcacgaacagatgatatggatcaagtattagggcttgaaatgggggcggatgattatgtggcaaaacccgttcagccccgtgtgctattagctcgcattcgtgctttattgcgtcgctctgatactgttccatctgatacctctccacaacgcttagagtttggtgatttggtcattgataatggtggtcgttcggttacgcttaatgacgaattggtagactttaccagcgctgaatatgatttgttgtggttgctggcatcaaatgcaggtcgaattttatctcgtgaagatatttttgaaagactccgtggtattgaatatgatggtcaagaccgttccattgatgtacgtatttctcgcattcgccccaaaattggcgatgactcagaaaacccaaaacgcatcaaaaccgtacgcagtaaaggctatctatttgttaaagaaggcaattaattcacggcattttgtttcgacaaagtgatacgtgtgaagccagctattgctggctttcattttatcaggcgctgtttgatatgactttggttagttttacagaaagaagtatcttttttagaatttatgcaggacttttgcttgtctgcttatctgttgctttttttgcgtatctattggtagataccattaaccaagaacgggctcagtcttatcgagaaacagtggcaacgggcgttttttatttgattggtcaaggtgccattcatcaagaaaccaacgcccaaaaaaattattggttaaatgatatcagtgcgttatttgggagtaattttgaaattattcccatggacgctatcgaatttaaagccagagaaatgcgtcgcattgaagaggcaaaaactgttgtacggtacgatccttacaccaatcaatcaacattttaccatcgtcttgagggtactgatgagattttgacggtcaaattggctcaggttggtgagcgtcaagtgcgtgccatgaccatttttttgttagatgatttatcgtattttcatggttatgagcaaaaacaggctcgccttgaatatttgagtgaaaaattcagttatccgatttatcaacagtctatcaataatttgcatcttgaccatgatcaaattgccagactaaaacgggatgaattggtcatttcttatcaagatgggattcgaggtcaaaattctaccatgtcgttcattgttgcctcagaggtagaagatatggtaattgtagtcggtcctgtgactttatttaattggtttccgctgaatcttttggcaagtgttgcactgatttgtgttttattgattgcacttggcgtgtatgctttgatttttcctttagaaaggcgtcttcagttgctacaacttggtgttaatcgtgtggctcagggtaatcttgataccaaagttcaagtagtgggacaagatgacattgccagattgtcaatgacatttaatgccatgacagaacacatcaaacgcttgattgaatcacaaagagagcttactcgagcggtatcacacgaactgcgaacacctgttgcacgcattcgctttgcggtcgatatgcttgctgatacagacgatgaagactctcggcagctgcaaagacagtttattgatgaagatattgagtcgctcaatgaattgattgatgagattttgacttacgcaaagcttgaggagggttctccgaagcttgattgggagatggtgaatttgtgtgacctgaccgagcaaattgagcgtgaaaccaatgcattaggcaagcccattcaactgatttgtaaattaccacctgctaaagctgtggcgatggcagataggcggtatctacaccgtgtggttcaaaatttggttggtaatgcactgcgttatgcacaatcaaccatcatgctaagtgctggcgttgttaagggtgaggcgtttatcagtgttgaagatgatgggcatggtatttctgaggaaaatcgtgaaaaagtttttatcccatttgccagattagatgatagcagaactcgggcgtcgggtggttatggtttggggttgtctattgttagtcgaattgcattttggtttaatgccaagctatcggtagatgaaagcccaacgttgcatggtgcaaggttcattatgaaatggcctgcaaagcaagtgggtgttgtggttgcagccgatgagttgactcaagacagagttgaaaaaaccatccatcaaaaaggcagtattaagccagattagttgacgtagtgtcaaaatcatcatttggcgtatcattaatctgggtcattaacgggattttgatacaaacttgtagcccgccattgggatgattgatggcctcaacgacaccttgatgcagatgagcaatgcgactgacgatggcaagacccagtccgctgccttgtgtggtacgagcagactcaccacgctcaaacggctgcataattcgctccaattggtcttcagcaacgccttcaccttcatctttgacgcataaaaccagtgttgggtagtgatcaaagatatgatcattttgtgtgttctgagctgggggtatgatttttgcgatcaaatgtattggctgctctccatagcgaatggcgttattgaccaaattgacaattaaccgctttattgataaagttcggacaggcacaggttgagtaatggttgagttgtaaataaactgaataccatcaaactgaaccaaaatttctttaaatattgcatccaaattggttggtttaacaggctcatcagaaccatctttcataaaagagatgaattgttctaaaatggcatccatatcttcaatgtcatagaccaaaccctcacggaaaaattcatcaggcagcatctcggcagtcagccgcatacgagttaaaggtgttcgcaaatcatgactgatacctgcaagcataatagtgcgttctttttgggcttgattgagggttgtaaagagccgattaaatgctgtattggctttgcgaatttcattgggccctgtttgggtgggtaaggtggttgcgtgaccatgaaggatataattgtttgcagcacgctctaatttttttaaaggacggtttagtcctcgtaccaaaactaaaatagtcataatggtcagtagtggcaagccaaataaaaatccgtaaataacgcctgtgctgtactgtgaataatacatcatcggctcacgaatccagatatcaggatgagcgctgtcatgaatccaaagtttgggggtgggtttgaatttaaaatacacttccacctcacgaccaagtgattgcgatatttcttctgccataatttgggtaagataaacaactacaggtttatcggtgatgcttggaaaatcttggggattggtgatgatttcaatgtgcgtattgtctgttagccattgcataaattcaggattatcatgccatttatcgcccactgaggttaatagtttaatttccgtggataaataactggcatggtttctaagctcaggcaaataaaggcttctccaaaataatgatatggataatgcaacactaacaaagacaataaagcataccatgagcaatgtttgtagcgtattcgaatacagtttataattaagttttgctaaaaaaattcgaaattttttattcgtgtttttattcatgaccagctgcctatgatttgcccaagcgtattttaacacagcttgaaccgagctttttaagcaaattttgataaaaattcattttttgcttttaacttgagtaatttcttgttataattagtcttttagtggttcaggttcgaacggctcatcctcattaatatcgaatctgtaccatgctctaattcttgcaaatgatttttagatttttattttataaaagagagttatcatggtagttattcgtctagctcgtggcggttcaaaaaagcgtccattttatcaagttgttgttgctgataagcgcgcatctcgtgatggtcgttttatcgagaaaatcggcttttttaacccaatggcacgaggtcaagaagttgaaacccgcattgatttagaagcttataatgcttggattgccaaaggtgcacagccaacagagcgtgttgcttctttagtcaaagctttgaataaagctgcttaatcattcttattaagtacggtttgcgttcaaattgagcgtaaaccgttttgtgctatttgatttactattatattgatgtatcaaagatcccatttttgggtatttttagatcatcaaccgatatttaagtacttattaacttgtatatgaccaagccaaacctttgtaaaacaaatctggtacctgatgcttctgagatgattaagattgctaccttaaaaaaaccttacggcatcaaaggttggctctgggtttttagccagaccgacgaaagagccagcatttttcagatgcaaccttggtggatgaaaacggcaacagggtttaagccattaactgttaaagattggcgtatccaaggtcagggtttggttgcttgctttaatgaagtgcctgatcgcaatgttgctgaaacgatgaacggtacgagtatttgggtttgtaaagaccatttacctaagcttgctgatgatgaatattattggtcagatttgatcggtttgactgtgatgaatgagcaagcagaaaatcttggggttatcaaagagatgtttgagacaggcgctcatgagattatctcgcttaagccaacagcacagagcattgataatgaacctcgtttgatcccatggcatagcgatgtggtgctttcggttgatttgagtgctgggacgatgcttgtagcttggcagtctgattattagtcatcattcgtaatttggtttagggtaatttgagtgttttttgcggttatcagcattttgccagagatgtttagtgctattaaagactatggcatcgtgggtcgtgcggttaaaaatggtcaagtgaatatccaagtcatcaacccaaggaattttacgacagataattataaacgcatagatgagcgtccttttggtggcggtcctggcatggtgatgatggcagaaccgcttgaaaaggcaattttatatgccaaagaattagctggcagggcaggctgcgatatccaaaatggcagatgccctgtggtatatctatcgccacaaggcaaaactttaagcgagcctttggttgccaccatgccaaatcttgatggcatgatactactgtgtggtcgatatgaaggcattgatgagcgattgattacttgctatgttgaccaagagatatctattggagattatgttctgacaggtggtgaactgcctgcgatggtattgatggatagcgtcattcggcgattgcccaagattatgggtgatgatctgtccgccgagcaagattcgtttgttgatggccttttggattgtccgcactataccaagccacttgattttcatggtcaaactgtaccgccagttttactttcaggacatcataccaatattaataaatggcgttttttagagcaagttaaacgcaccaaagcccgccgcccagagctttggcaaaattttataccaaataaacagcaagccaagtggctaaaagacttggaagattgatttaaattcattaaaatctgtatggttcagatgtagcgtgcgtgatgccgctttattaacgatggtatgcgactttttaaccattgcctaactttgtgttttgcaagaaagttttagcctctgccatgattatcaggagaaatcttgtgagtaataaacatccattagttcaagttgttgaaaatgcacaactaaaagaccatccatcatttgcaccaggtgatacggttgttgttcaagttaaagttcgtgaaggtgaccgtgagcgtcaacaggcctttgaaggtgtggttatcgctaagcgtaaccgtggactaaactcagcattcactgttcgtaaaatctcaagcggtgttggcgttgagcgtgcattccaattacattcaccattgattgctagtattgaagtgaagcgtcgtggtgatgttcgccgtgccaaactttactatttgcgtgagcgttcaggtaaatctgcgcgtattaaagaaaagttgggtgttcgcaaaactgcagaataattctgccatttgcccaacccaaaaaaaatccccaagttcaggcttggggattttttattatcttagttaagtttttggagttgcttgggatgtcgtggtgcttgatttgcagccttttggtctaaaatcatcatctacatcggtttcacattcccaaccatctttggggatatgcttccaggttaaatgtttattatgtaggacgctggcggcattgccactaaaaacagctttaatggtgctttcagtattgccttcatttggtaaagtaacagttggcttgttgtcttgcatcaagtcactatttatcgtatctgctttacaaccttcagttttaagaccttgaagcaagcacatctcaacagccgtacgcagttggctggtttccatcatgacacgatttacttgggcggtaacgacgcgtttttggtattgaggtatggcaaacatcgccaaaacaccgatgattaacatgacaatcatcagctctatgagagtaaatccttgttgtgctttcatacgattatccaaacaattaaaattctcattttgccataccgtttataaatatacaataaaaaattattaaaacaagcgttgtattgtatctttaatcatcgtgcgaatattaatcacatcaatttaaaagacaaaattggtaaatttttaatagttattagccatttagatatatttattaatttaataggatattttttaaataaatattgagtatctttggatattttttgtaattattgcagttttgggctattattatcagtggagaagtaacgcttgtttgtattcaaaacaggtaaggttatctttaggcacttgtaagtttatcaattattcttgatttgcaagcaccgattaagattatttagtttaaaagaggatatgctatgtcgcaaatgctaaccgaatacagagcccatgtcgctgagcgtgaagtcttaggcgtgccaccacaaccattaactgatgtccaaactgccgatttgattgaactcctaaaaaaccctccacaaggcgaagaagagtacttgatagacttgcttgaaaaccgtgtgccagcaggggttgaccaagccgcttatgtcaaagccgcctttttaaatgccatcgtcaaaggcgatgccacttctccgcttgtgagcaaagagcgtgcggtatatctattaggtaccatgttaggtggctataatgttgcacctttggttgaactgcttgatgatgatgaactgggtgagatggctgccaaagcactcaaaaaaacccttttggtctttgatgcttttcatgatatagaagaaaaagccaaagcgggcaatgccaatgccaaagccgtgctagaatcttgggcagaaggcgagtggtttacaagtcgtcccaaagtgccagaagagatgaccatcaccgtatttaaagtcactggcgagaccaacacagatgacctatcacctgcccaagatgcgtggagtcgccctgacattccgctacacgctaacgccatgctaaaaaatgagcgtgagggcattcatccagaaaaaaatggtgaggttggtcctttgacccaaatccaagagctgcttgacagaggtcatcctgttgcctatgtgggtgatgttgttggtacaggttctagccgtaaatcagcaactaactctgtattgtggttctttggtgaagagattccccacattccaaacaaaaaagatggcggtgtgtgtttgggcggtaaaattgcccccattttctttaataccatggaagatgctggggcgttgcctgttgagattgatgtaaccgagatgaacatgggtgatgagattaccctaaaaattgaccacgcaaatgcaactgttgccgcctttaaagatggcacacaaattgccaaatctaaactaaaaacccctgtactgctagatgaggtgcgtgctggtggtcgcattaaccttatcatcggtcgcaacttaacaagcaaggctcgtgaatccttgggtcttgaaccatccactctatttcgcaccccagagcaacctgccgatactggcaaaggctttaccttagcccaaaaaatggtgggtcgtgcctgtggtctgccagaggggcaaggcattcgtccagatacctactgtgaaccgaagatgacaaccgtaggctcacaagacactacaggcccgatgactcgtgatgaactcaaagatttggcatgtctgggcttctcatctgaccttgtcatgcagtcgttttgtcataccgccgcttatccaaagccgattgatgtggtaacgcatcacaccctacctgattttatcatgaaccgtggcggtgtcagttacgcccaggtgatggggtgattcattcatggctaaaccgcatgttgctgcctgacaccgttggtaccggtggcgacagtcatactcgctttcctattggcatctcatttccggcaggttcaggccttgtggcattcgctgctgccactggtgtgatgccacttgacatgcctgaatctgtactggtcaaattcaaaggcaaaatgcaacctggcattactttgcgtgatttggttcatgccattccttactatgccatccaagcgggtgatttgacggttgagaaaaagggcaagaaaaatatcttttctggtcgcatcttagagattgatttgactgagatggaaaacgacttgaccgttgaacaagcgtttgagttatccgacgcttctgctgaacgctctgccgcaggctgtgccatcacggtatcagaagaaaaagtggcagaatacttacgctctaacatcgtcatgctaaaatggatgattgccgaaggttatggcgatgctcgtacactggctcgccgtgctgaaaatatgcaaaaatggcttgacaacccaagcctactaaaagcagatgctgatgctgagtacgccaaagtatatgagattgaccttgctgacatcaaagagccaatcctatgctgtccaaatgaccctgatgatgccaaactgctctcagaggttgcaggcgataagattgatgaggtattcatcggttcgtgcatgaccaacattgggcattttcgtgccgcaggtaagctgttgcaagaagtaccagcgggcagcctaaccactcgcttgtggattgcaccacccactaaaatggatgaacgccaactgatggatgagggttattacaacacttatgcccaggcaggagcaagaaccgaaatgcccggctgttcactgtgcatgggcaaccaagcacgcatcgcacccaactgtaccgccgtttcaacatccacccgtaatttcccaaatcgcttaggtcaaggggcaaatgtctatctggcatctgctgaacttgcctctgtggcatctgtactgggcagactgccaactgttgaagagtatatggggtatgcaggtaaactagaatccatggaggcggaagtttataactacctaaactttgaccaaatgggtgaatatactggcagagctgatagaattgatgttgcacagctgaactaagatatcatctttattcaaaataccgttatctgatgatgacggtattttttgtttaagattgaaaaatcatttgtacagataattattttttgctattattagtatatacaatttattacgatctttaataatttaaattttagcgaaaaaggacatttttatgaaccaatttactcgcactgacacaagccgtgtcatcaaagccccaacaggcacagcattgacctgtaaaagctggcttagcgaagcccttaccgcatgatacaaaataacctacaccctgatgtcgccgaaaacccccaaagtcttgtggtctatggcggaattgggcgggcggcacgcaactgggaatgttatgaccaaattttggcaagtctaaaacagctagaagatgaccaaacactgctcattcaatcaggcaaacccgttggcgtgttcaacactcacgaaaatgcccccagagtgttaattgccaactccaaccttgtgccacgctgggcaacttgggagcattttaacgagcttgaccgcaaagatttgttcatgtatgggcagatgaccgcagcagctggatttacattggcacacaaggcattgtgcagggtacttatgagacctttgccgaagcagggcggcagcactttggcacaaaaaaaggcgacaaaagcaccgataactggaaagggcgttggattttgaccgcaggcttggtggcatgggtggggctcagccactggcagcgacttttgcaggggcgacatcgcttaacattgaatgccaacagtcaagcattgattttcgtttgcgtacaggctatgtggataagcaggcaaacgacttaggccacgcttatgaactcatcaaagaacacaccagtaaaggtgaggcggtatccatcgctcttttgggcaatgccgctcaaattttgccacagattgttcagcgtgccaaaaatggcgacatcaagcctgattttgttaccgaccaaacatcagcccatgacttaattcatggttacctgcccattggctggacggtggatgattggagggctgcccaacaagacccaagccaacatgccaaattgacccaagaggctgccaaatcgtgtgccattcatgtgcaagccatgcttgatttgcaaaagatgggcgtgcctgccaccgattatggcaataatatccgtcaagttgcctttgacgctggggtgaaaaatgcctttgattttccaggctttgtgcctgcttatattcgtccgctattttgtcaaggcaagggcccgtttcgttgggtggcactctctggcgaccctgaggacatttataaaaccgaccaaaaaatcaaagagctgttcccagagaacacacatgtacataattggctggacatggcaaaagaccgcattcactttcaaggtctgcctgcccgcatttgctggctgggtttgggtgagcgagacaaggcaggtctggcatttaatgagatggtgaaaaatggcgaactaaaaggcccgattgtcatcggacgagaccacctagacacagggtcggttgccagccccaaccgagaaagtgaatccatgaaagatggcaccgatgcggtgtccgactgggcattattaaatggcatgctcaatgtggcaggcggggcaacctgggtaagcctgcaccatggcggtggtgtgggcatgggttatagccagcattctggcatggtaattgtcgccgatggcacagaagcggccgccaaacgccttgccaatgtgctggtcaatgactgtggcagtggcgtcatgcgtcatgctgatgcaggctatgaattggcgattgaaactgccaaaaactatggcttaaatctgccgatggtgaaataagttgtcaatgatggttttaaaaaatgttcagttgttgccaataaacccaaatcaacaaacttaataaacttaaaacaaattattgtttggagaaaccatgaattcgctcatattaaccccacgaaacctcacctttgcccagcttcgccaagtgtacgatggccctgtcaaaatcagccttgacccaacagcgtatgaagcgattgacgcatctcgtcaagcggtgcaagccatcattgccaaagataagcccgcctatggcattaacactggctttggcctgcttgccaaaaaacgcatcagtgataatgagcttgagctgcttcaacgcaatttgattttatcgcattcggttggcacaggcgacagattgcctgatgaggtggtgcgcctgattatggtgatgaaagtatcaagcttggctcaaggcgtgtcaggcgttcgccgtgaagtggtggacagccttttgggcttaatcaatcacaatatcattccccatattcctgccaaaggctcggttggggcgtcaggggatttggcgcctttatcgcacatgacgcttgccatgttgggatttggcgatgtgtctgtgaatggcgaaaacatgtcagcaaaaaaggcccttgatgacgcagggttaactccgattgtgttggcggccaaagaaggattggcactgattaacggcacgcaaacatcgaccgccttggctttgcgtggctattttatggcacaagatttgctggcggccgccacggtggttggcagcatgtccattgacgctgccaaaggctcagatgccccatttgacgctcgcattcatgacgctcgtgggcatcatggtcagacacaaatcgccagtgctcatcgccagttaatcgctgacagccaaatccgtgcatcacacaaagaagatgatgaaagagtacaagacccttattgtttgcgttgtcagccacaagtgatgggggcgtgtttggatgtgattaaccaagcgggcaaaactttgttgattgaagccaatgccgttactgataaccccttgatttttaatgacaatgatggccctgtggcaatctcaggcggtaactttcatgccgaacctgtggcatttgctgctgacatgttggcacttgccatcagtgagattggttcaatgagtgaacggcgtatcgctttgctcattgatgccactttatcgggcttgcctgcctttttggtcaaaaatccaggggtgaactcaggatttatgatagcccatgtgaccgccgccgctttggcctctgaaaataaatcacacgctcacccagcatctgtcgacagcattccaacctctgccaaccaagaagaccatgtgtcaatggcgacttatgcaggcaggcgtttatatgacatggcttgtaataccgccaccattgtgggcattgagcttttggcagcggctcaaggcgtggattttcatctggaagagggtttacacacatcgccaaaacttgccagtgttcatcaaacattacgccaaagcgtcgcccattatgacaaagaccgctactttgccccagacatcgaaaacgccaaacagctggtgattgatggcaagctgattgacagctggcgggagttgcgtacggattggtttttggcaaaatagcatcaatgtgtgtctgtcatgttgtcatgtctgtgttttttcataaagggaaatgattcaatgtccttttatgaaagaaccattcaagctttataggttaggaaatcattatgacaccccccaatgtttatcatcaagcccctgattttaaggcatacacaggcagggcagaaccttttgaaaatgacaaagcttgctattggtatcagtacattcaagcgtttgatgatgctcttaatcgaaaaaacaatcaaaaaaaccagccaaaaattgccctaattggatttgcttgcgaccaaggggtgaaccgcaaccaaggacgcattggggctaagcatgcccctgatgccattaaaagcagttttgccaaattaccaatttcatatcaaacacaacaagcctttcaatcaatggcgggcatcgtgaccgatgcaggcaatgttgtctgtgatgatgatgacacaatttgccccaatttgttagaaattgctcaacaagattatgctgataaaatcagcacagtgctaaacgccaatgccttgccgattggtttgggcggtgggcatgaaatcgcttgggggtcgtttttaggcttgtggcaacacatggcagtcgcccccacgcctttggcaaacattggcatcatcaatttagatgcccattttgatttgcgtcaagaccaatacgccacttctggcacaccgtttcgccaaattgctgagcatttggacataaaagagcagccatttcattatttgtgcataggcatcagtcagtttagcaacaccgccagtttatatgagcaagcctttgatttgggggtgagtgtgattggtgataatgattgccatcgccttgattggcaagcgattgaacaaaaaattttggcgtttattgcgccgcttgatgtgatttatttgaccattgatatggactgtttggcaggttctgtcatgcctgcggtgagtgcggtggcggccaaaggtttaagccttgattttgttgagcgttgtgttttgctgattatcaatacaggcaaagttaaggtgattgacatggcagaagtgtcaccaaaatatgacattgatgggcgtgggttaaaagttgctggtcgtttattggcggtgatggttgaagcggttttatcatcatcattcaaatcattgtctagataaatcagacctaattgccaaatcaagcacatttctagcacagtgttttaaattgttttaaatcaagcacagtgttaacacagtgttaaattcaaccatttgttatgtatgataaaaccatgaaaaataccatgatgaaaacacattttgacttattaatcacccatgccaatatcgccaccatgaacagcgattttggctttcatcttgataatcaaagcaatcaaacaaccaagacggcaacgccctatgggcaactgaccaatcacgccattggcatcaatgatggcaaaattacatggataggccatcatgatgatgcatcgtcattcaccactgataggttgattgacgctcaaggcaaatggcttaccccagccttgattgattgccacacccatttggtgtatgcaggcaaccgcagtgatgagtttgaagcacggctaacaggggtaagttatgaacaaatcgccaaaaatggcggtggcatcatctcaaccgtcaatgccacacgccaagccagctttgatgaattatacgcccaaagtgaaaaacgcctaaaagcattgcttgctgaaggcgtggcaacccttgaaatcaaatcaggttatgggctggatttgcaaaacgaacgcaaaatgttgcaagttgcccgcaagcttggacaagattatggcatcacggtcaaaaccacctatttggcagctcacgccacaccgccggagtataaagacgatgacggcaatgcccaaaacgatgcttatattgataaagtctgtgagtggttgccaattttgcatcaagagggtttggtcgatgcggtagatgcgttttgtgaaaacatcgcctttaacaaacagcaggtaaaaaaagtctttgaggttgctcaatcgttgggattgcctgtcaaattacacgccgaacaattaagcgatatgagtggtggggcgttggtggcaagttttgatggtttgtctgctgaccatattgaatacctaagcgatgatagcattcaacgcatggcacaatcaggtacggtgggcgtgctactgccaacggcattttatgtgttaaaagaaacgcaattacctccgattgacaaaatgcgacagcaaggcgtatctatggcaatatccaccgactgcaaccccggaacatcgccgtctacttctattttgctggcgatgaacatggcgtgtaccttatttcagctcacgccagaagaggcgctggcaggcacaacattaaacgccgccaaagcgttgggattgcaagacagcaaaggcaaaattgccattggttatgatgcggacattgccctttgggacattgagcgtcctgcggatttaagttatttgattgggcaaaataagtgtgttgatgtgatttaggtgggtggtcagattgatacgattaacgcccaataaaccaacgccaaggctgtaacgcaccgattgccatgccaattaaacccataactaaggtcgtatttagcatctcgccaagcagtggtactgcaatgatactggcaataaagggtgctaagttggcgatactacctgctttgaagataccaatttttgcgacagcttcggcataagttaatgtggcaataatgaccacaaagataccatgaaaaataccctgaattgccaaatgcgtaggtgtggcggtatgaaaagcaggcgtgataaatatggcataaatcagcgaatagatgactgccgaccaaatcgcaacgccgcacatgatatgccatgccgaaaagctccacttacgaagcaataccgaaaacaagccccagcataaaccactggtaataaacatcaaatcgccacgcccaaaatacccatcgccaatgattatgctgatggtcattaaaagtaaagtcatcacgatgattgataagccgatgcctgtttgtcggtcgatgggcgatcttagcattatatagccaataagagcggcaaatagcggaaatgtaccatttaaaaaaaccacgccatgtgccacaggtgcataaaaaaatccgttataaacaaagatacaatacccaatactgcctactagagccaatatcagcagtttaaaatcaaacaaaaattgatagtcttttttccaccataaaatgggtaaaagtacagcagcagcgataccaaatcgcaaaagcaacacatcccaaatctgaatatgccaataggcattcatgcgagccattagcccaaaagcaccccaaatgcacatggtgataaaggtaaacagatagccttgttgtttatcagataagcaatgaaatacagccataaccaaccgcacagacaaaaaggtcattgtatcatgtaaatccccgaacctaagcaatgaatgcctaaaaatatgttggtgtgatggtgaaatgggtaaaatattgttacaaaaatgacc

SEQ ID NO: 39 - DNA, 100848 bp, Moraxella catarrhalis
aatattacacaaactttttttataatgttcgttcgttcgttcgttcgttcgttcgttcgttcgttcgttcgttcgttcgttcgttcggatttaatttttatattatcatatcaattatcactattttttatattaagattgtagaggattacttatgagcattcatacaacggtcgccagacgcccttcatggcgtggcatttttgcaggacttttgatgggtcttgttgtatctatgataatgctggctttggccttagtgctaagctcttttttatcactagatttgcgtggcgcaggcattgctgctggtgtttataccgcagtaaccgctttaatcagtgcttttgttgcagggttttttgctgtcaaagcatcggcaccagaggcgttatttggtgatggtaccgacattttgccaaaagacgctgctttaacaggtatgctaaccgcagcagccatcgttgtcatcagctctgtatttgcttttaatagtgtaactggcattgtaagaactgctggcaacgctgttggcacaactgcaggtgctattggaggggctgccagtgccgttacatcaacggtaacaacagtagctggtgctggtgctaccgcagcagctggctcatctgatgccgcagtggcgatatcactgccaaagcacaagagctgtaccaaaaagccacaggcaatatcagccgtcaagacatcgaagcttgggttgctaagaataacgaaacttttgatgaagcacaaatcagtgcaacagtgaatgtacttgaagacatgcttaacaaaaccaaagctgaccttaatggcatggattttaccaatcttgacacatggaaaaatattgatgaatatgccaagcagcgtgccgacgaggtacaagccattgttacaggcgatgaacttattgccagactacaagcagagggtttaacccaagagcaggcattggaagtgcgtgaagaaactgccaccgcttatcatgaatatcgtgccagcaccgaacaagccattgctgatgctaagatgaatattgagcaaactctacaaagtgcagaagatactgctcgtaaagctgctctatactctggtctgttttggttgattagcacgctactgacttttgtggcaagcatcatgggtgcaaaaacagccgcagcaaattaccgtttggcatcacccatcactgttcgtgagcgtgaccttcgttaattgccaacaagcaatgttcttaaaaatctgtcaatattttggcagattttttatgtcaatttttatgccatgtgataaaatcagagtgaacttttttgatggttcatgaactttttgattaaaaatgtatgaaaaatccatttcacttgacacccaccccacgcacttgcccacatggtgattgtggcaagatgttttgtgatgcgatttataaacatggtatcatcttttgtctgcattgccaaaaaagcctattggtcaatccatttacgcctgatttgcagcaaatgactttttggcaatttgtcaaagatttcaccaaaagatattataaaatatatgttgtttgtactggcatgcccatattgatttataccgccatatttgcttttgatggtttagataaattcaatcttacaacaggattttaggtggcagtgattgttcttatgatttttttgttttttgtggcaattgttgccattgaaaataacctaagatattatcaaaaataaaaaacaaacccctactaaaaggcgtggataactatgatgatgtcaaaaatgattttaacatctctgttgcccatgataaactagcaacctcttttgatacacatgcaccatattgtccacattgccaatctcaaagatttcacaatacagcagatgatgattatgtgtgtcaaaaatgccatacaaaatcatccctaagttcaaaattaaaaaacacgaataccatacaatttgcatcaatctacaccatcttatttttgataatgagatatgtcagttttgatttttatttgtttatttatattttggctgtctttgtgatatttttaatcaacttatccattaactattattggtacaaaaccccaaaatggctaccttaaatatccctcttgttgaacgcctttatcacagcgaccatcaaacccaaaataacgccttgcttgatttgatgttatcatagcaatcttaacgcctaagatattttatcatataaacaatatttattaatttataataacttaaaaattaattaagaaaaattatgaagttgatttatctacatggattagatagtgatagcaatgcaataaaagcacaaatcacacaaaattattgccaagctaactatccaaatatcgaagtcattcgacctgatcttaatcgtacacctgatgaggtggtcaagctcttaaaatctctgatcattgatgatcgaaataccgtcttaattggttcatctcttggcgggtattttgcgaatttattatctgatttgacgggtgtgcctgcggtgctgctcaatcctagtatctggcctgatatcagttttcgccgatttttggatcaaaattttgatgaacgtgctttgtctgatgagacagtgatttatacaacaacgggcggttggcagattacttatggtgatttggcatggtttgagcggcatcgattggctgttaaaaatcctgatttaatcaaagtattacttaagatgggtgatgagcttttagacgcacaggtaacccaagctttttatgatcaaaaaggcgtgcaagtattggcacaagcaggaggcgatcatcgtattagtgattatgaagtgcaggtggcaacagtgattgactgggctatccgattgcatcaaagatagttgaattcaaatgaatttgtacaatcagtatttcaaaatttatgtattaaaatccatcgcttcaatatcaagtatgatatttttttctaaaaatacaaagccttcaagataaatccatgacagcggacaaaatttaacaccatttcccaaaatcttagctttggtgtacaatgacctatatttttatccataatatttatgagcacatataattcacaaaaattagaagttttagaaggtttagaaccagttcgccgccgcccaggcatgtatactgatactatgcgtcccaatcatcttgcccaagaggtcattgataactcggtcgatgaggcattggcaggatttgctcgtcatatcatcgtcattttgcataaggatggttcgctgtctgttgaggatgatgggcgtgggatgccgaccgatattcaccctgaatttaatcaatcaggtgttgagctgattttgacacgcctgcacgctggcggtaaatttagcaccgaaaactatcaagtctctggtggtctgcatggcgtgggtatcagtgtggtaaatgcattgtccacacgcgttgaggtgacggtgtggcgtgatggactgatgcacacgatggcatttgaacacggtgagcctgttaccgctttgattgctgataaatcagccaataaaaaaaagcgtggtaccaaagtacaattttgggtggatgggcagtattttgatacgccaaaattttcaattaaaacccttaagcataacctaaaagccaaagcagtgcttgcagcagggttacacattgattttatcagtgagattgagccaaatgacagtgaaagttggcagttcaccgatggtgtggtgcaatatctgaccgagcagctagatgggtctgatacattacctaaagagccattttatgttagccaagagcctactttgggtgagcgtggcggggcgacttttgcgttatcgtggcttgctgagggcggtacaccaattaccgaaagctatgtcaatcttattccaactgctcaaggtggcacgcatgtcaatggtttacgcacaggtgtgcttgaggcactgcgtgagttttgtgatattcataatttattgccgcgtcaaatcaagctgtctggtgaggatgtgtgggatggcgtcaactacattttatcgctgaaatttgttgaaccgcagtttagtggacaaaccaaagaacgcttatcaagccgagaagctgcgccattggttcaaaccttggctaaagatgcttttagtctttggctaaatcagcatccagatcacgccaaagccattgccgaacttgccatttcaaaagccaccaaacgcctagcaactgcacaaaaagtggcgcgtaaaaaagtcactcaaggaccagcactaccaggtaagctgtgggattgtcgtgggggattaaaagaaggttcagagctgtttttggtggaaggtcagtcagcgggtggatcagcaaagcaagcgcgtgacaatgcatttcaggcaattttaccactgcgaggtaaaattttaaatgcttgggaggtgtcatcagatactgtattgtccagccaagaaattcatgacattgccattgcgattggtgtagatcctgcatcagatgatttatctgagcttcgatatgataaaatctgcatcttagcagatgctgattcagatggtctgcatattgcgacactgatttgtgcgttatttgtgaagcattttcctgcactgattgaagcgggtcatctgtatgtggcggtaccgcctttgtatcgtattgatgcaggtaaggatgtgtattatgcactggataatgaagagcttgaacaagtacttgcaaggcttggtaataaaaaaacgcaaatcactcgctttaaggggctaggtgagatgaatccaagtcagctgaaagaaacgacaatgaaccctgatacgcgcaagttgattcgtttggatttggatgataccgcaagcacaaacagcatcatggatatgctgcttgccaaaaaacgctcagcagaccgaaaacggtggctagagaccaaaggggatttggcggatatttctgtttaaggtgattatgataatgacctataaaaccatgattaagatggcttataggtcatgtttaatcagttaaaatggctggtagtattaaggttgccaagtaatgaaatttgacaacagttttaagcctgcatgatggcttttttcgggatgaaattgagtgataaaaagattatcccaaatgatacttgaacaaaacttctgaccataagtggtatgcgctaaaatcagctgattatttggcgtggggtcacaataatagctgtgcgtgaaataaaaatactcatgattgcagccttgccatagcatatgatcggtatctgtatcaacacggttccagccaacatgcggtattttgattggttcatcattttgtatccaagcgtcatcaaatctgcgtaccgtgccagaaatgatgcccaaacaagggacatcgccttcttctgagacatcaaacatcgcctgcataccgacacaaattgccataacaggcttggtattcaaagcttctttaacggcgatatcaatgccatgtttagccatatgtgccattgcatcacgcatagcacccacacctggcagcagaattttatctgcttttttaatatcatcggctcgatcggtggtgatgacatcagcacctgccactttgagtgcattagcgaccgaatacagattaccaacgccataatcaagtaacgcaactttagtcataacaaccccttagagcatatttttggttgaaggcaattgatccttggcacgctcatcatactcaaccgccattcgcaatgcacgggctaaggctttaaatacgctttcaatttggtgatggctatttttaccttttagagtatcaatatgtaaggtgataaaggcatgattaactagcccataaaaaaactcagaaaataaatcgacatccatcgagcctatgtgtgagcgtgtgaatggtacattcatgtgtaaaccagggcggccagagatatccaccaccacacgagataggctttcgtcaagcggtgcataaaaatgcccataacggcgaatgccttttttgtcgcccaaggcttgtttgagtgcttgaccgattgcaataccaacatcttcaacactatgatgatcatcgatgtgggtatcgcccacacatttgacatccaaatcaatgagtccatggcgcttgatttgatcaagcatatgatcaagaaacggcacacccgtatcaagcacgccttgaccgctaccatctaaattgatattgacactgatttgggtttcggcggtatttcttgtgacactagaaaagcgagtcatgataatccttgaaaaataagacggataataattcaccgctattcttgcataaaagcctaaaattgccaatagtcgtgattaaaaaagccatgttttaccaattaaatcgtaaatttttgcaaaaactttgatgaattggctggtagattatctttttgccccattttccagtataatagtttgtttaacatgatatcgtatttaccaccgagataacaaaattatggcattattacctattttaacatatcctgacccacgcttacgcactttggcaaaacctgtcactgtctttgatgatagattaaagcagttgattgaagatatgtttgagaccatgtatgacgcacgaggtattggtcttgcagcaacgcaagttgaccgccacatacaactgattgtgatggatttggcaagaaaggacgaaccgccatcaccgcagtatttatcaatcctaaagtgacaccgctcgtagatgagcattcgtcttatcaagagggctgtttgtctgtaccagaggtttttgataccattgagcgacccagccgtgtacgcattgaggcacttgataaagacggtcagccgtttgagatagaagctgaaggcttgttggcggtatgcattcagcatgagatggatcacttaaacggtaagttatttgtggattatttatcgacactcaaacaaagccgtgcaagagataaagttaaaaaggcactcaaagcacgagaaaaaacagtaaacagtacaactgataacacacttaaaaatagctaaatttagcaaggttaaatgacggatacgaatttttagcacaaaaaccctaacaatgacttacttatattgcaatttggatggtttatgctcatttctttgacttttgaaaacttagcactcattgagcaaaaacacattgattttgatgatagattcaatgtcattacaggcgaaacaggtgcaggcaagtcactgattttagatgcattatcgctgtgtgtcggtgagcgtgctgatagtagtatggtgcgtcatggctgtgatgaggcaagtgtttttggtgaatttgatatcagtggcaatgcccaagtgattgcttggtttgagcaacatgacagaaaattagaagatgaaacgttgctcattcgccgaaaaattagcaatcagggacgctcaaagtcttggattaacggcgtaccagccagtattagtgagctaaaaagcttgggatctatgcttgtgaatatccactcgcagcatgctgggcttgaactgctaaagcctcaatttatcgtggattggctggatcgcattggtgggtttggtgatttaaaggcagcggctaagaccgcttttcatcactatcaaaccctaaaaaggcaggctgatgacgcacgcagccagtcagcacagcgagcggatcggatggcactgttgtcagccaagcttaccgatattgaaccattgcttttggtggattttcaggaaattgaggcagaatacgatgagctatccaatcttgaaagtctcatgcgtgaagccctagaagcagcggtacaacttgataatgatgacgatgccccatcggtgctaagcctacttgggcgagcgatgcgtatttgtgataacaacgctcaatccagtaaaacatttggcgaatgtagtcaactgcttgtacttgcccaagagcaaatcatagatgccgttgctaagcttaccgattacgcagagcgggagctgcctgatgcggcgcgccttgatgagctaaatggcttattgagccttgcacatcgcttatcaagcaaataccacacgccgattactgagctgattgctgatgcagtgcattggcaagatgaattggatatgctaagcagtttgcctgataacgatacgatggatgctaaggttttagaggcttatcaagcctatctggtggcagcagacgcattggatcaggcacgcattcaaatcgcacctgatgtctgtgagcggcttgaggcacggcttgtgcctttggcactgccaaatgctcgctgtcagttttcttttaacgaaaaacctgttgagcattacaccgcccaaggcaaatacgatattgccttactatttagtgccaatgtgggcatgccacttcagccgttgcacaaagttgcatcaggcggcgagttgtcgcgtatggcactgaccatgcaagtgatggcggcggatgacggcataggtgcacatccaacacttgtatttgatgaggtggatgtgggcattagtggcgggacagcccaagtggttggcgagcttttgcgtacgctgggtaagcagcagcaactgcttgccatcacgcatcaagctcaggtcgctgctgcggcacatcatcatattttggtgtataaagaacacggtgaacacaccaaaagtcagatacaagttatcaccgatgaagcacaaattgatgaattggcacgaatgtcaggtggcgtgaatattaccgaagcgacacgtgctcatgttaaaagcctgctggcagacattcgccatgctgataagatggctcaaagaggtatggctacatgacacagacccaaaaactgattcatcattttttgattccaagtccacagatgactgatgaaagatttatggatgctgtcatttatatctgtcgccataccaaagatggtgcatggggttttattattaatcagtccctgccaaatagcgtaggcggtcttttgaccgagcttgaggtgccagtgactgcaagcaccatgcaagtacctgctatgaatggcggacctgtacgccctgaggctggttttattttgcacacagggcagcccatttataagtcatcttttgccatttctgaaaatgtctgcttgacgaccagtaaggatatcttggagcggttgtcttatgatggtttgaggcattatttattgtgtatgggctattgcaattggggcagaggtcagctggatgctgagatggcgtttggtgattggtatgcttgtccagcagacttgccaactttattttcaacgccatttgaagacaggcttaaggcttgttatgataagattgggattaatctgaataagttcattacaacaactggatatgcctaatgacaagcgaaaccttgacacttgctttagattatggagtcaaaaaaatgggcatggcactgggcaatagcatcacccataacgcacgcccctttgatattttggcgatgaataatgggcaacctgattgggataatctgcttggtatcattgagcattggggtattgatagggtgctggtgggactgccgctgaatatggatggcaccgagtcgatgctcaccaagcgtgctcataaatttgcacggcgattggcacatcggctgggcgagcgtcgtcaggcggtttcggtgtttatttatgatgagcggcttagctcaaaagaagccaagatgattgcacttgataacggctggattgcgtcatcatctgaaccaatcgacgatattgccgcatgtcttttgcttgatagctattatcatgcgcctaatcatgccatctatgtcagtgaacgaaaagactctcacaaagactgattttgtcaggaaaagctatgcagcaccatactttgattgctcatcaatttgaccaagccatacgccaagcaaccttaagtgtccgttttggctttggggcgattgtatgcttttgtatttttggaactttggcaagcctacctgcattcaaagacagcacatggatttattatgcctttcattatttgccgtacgcactcatcgccatgacgatgcccatcagcctgtatcacggctttttattgatgcgttatcgggtgatggacggctcaattttggtggtcattttggcaactgggatggcactgcttggatttacggtcgtgtggggcttgagcattggcatagatacggtgttttttatggcactatttttggcgatgattgcttggtttgggatgccgtttttatttcgggtcaatctaaaaaaatttgccagttttttggaagaaaaatcttcaaaatcaccccaagagccaatttaaatcatcttaatcttatgattgactgtgcagtttgtgttttgactaacggatttgaggtcaatcagttaaattttatccaaaaaccagagtaacaaaacaaccatggccatgattaaccacacattagataccaaagggctgatttgccccgaacctgtcatgctacttcataagatcattcgccaagcgcttggcggtgagcatattgagattttggcaaccgatcctgccacgatgcgtgatattcccaatttttgccgttatttggggcatacgctggtcaatcaagaaacactcgatgacggcagctatcgctacttagttcaaaaaaagcaagcataaagaccgtaggttttaagcgatggcaaaatctaccatacctcgagccgatagtgcggtgatctatgacgacgacccagagtatctgagcgaatttcgtgcagcaatgttggcgcgtgggttgtcgatagccaccagaaatgcgtatagccaagatgtacgcttgtgcattcgtttatcagatacgccagtgaatctatggcagccatcagatgtgcgtaatcacttgatgtgtctaaaagatgccaagaaatccgagcggtctatcgcacgcgcgttggcaagtctgtgccagttttttttgtggcaaattgagtcaggctatcgagaggataacccttgtgaatccatcaaaacacccaagcttggcaaaactttgcccaaaacgctctctgagcaagaagttagctcactgctagatgcaccagacatctcaagcgtgcgaggccttagagataaagccatgcttgaggttttgtatgcgtgtggcttgcgtgtcagtgagctgacaagtttatcacttgagcatctaaacttaactgctggttggctgtcggttacaggtaagggtaataaaatgcgtctgattcctttgggagaatatgcactgtctgcactcaatgagtatttggctgtgcggggcagtttgctgattggtaaaaaagactgtcaagcggtatttttgaccgaacaaggtggttacatgacacggcataatttttggcatttgattaaaaaatatgccttaatggctggtattaataccgccatttcgccccatacattgcgtcatgcctttgcaacgcatttggttaatcatggtgctgatttacgcagtgtacaattattgcttgggcatagtgatttatccaccacgcagatttatacacatgtggcgaccacaaggctacaaaatctccatgccaagcatcatcccagagggtgatttttcatttgagcattttttatatcaaatcatcatgtgatgttcactgtttaaattgagattgcttgagatatcttaatcttaataaaaatacaactgtaaactgtaaattcatgataaatcatgttaagataaaactaagcaaactgaattaaaatttggatacatcatgacacagtcagcaaaaaacaagtctgccaaacctgcttatcatgaaaaaagcgatgcagcacgcattgtcattacaggcatgggagctttaacgcccatcggaaatagtttagatacaatttggcaaaatcttacccaaggtgtaagtggtatcagtcgccttgatggatttgaggataaatcggtagcgattgatggatttcgtgcccagatcgctggattggttaagaattttgatgccaaagattatttaaatcctaaagaagcccgccgttttgatacatttgtacattatgcccaagttgccgctgccatggctttgtatcatgcagggctgattgatgatatcaaaggtgatagcttgcccatcaatgtcgatggcgagcgttttggcgtggtcatgggttcgggcattggcggtattcaaaccattgaaacaagtcgtgataccctaaagtcctatggtgcaaaaaaagtatcgccattcatcattccaggtgccatcatcaatatgccagctgggctgattgccatccgtcatcatctcaaaggtgcaaatcttgcaacgacaaccgcttgcaccacctcgacgcacgccattggcttgggggcaagactgattgcttatggtgactgtgatgcggtattggttggtggcagcgaaaaagcctcaacgccacttgggttatcaggctttggggcgatgcatgcactctcaacacgaaatgatgagccaacacgcgccagcctgaccttttgacaaagaccgtgatggttttgttttgggtgatggtgcaggtgcattagtgcttgaaagcttagcacatgccaaagctcgtggtgcgaccattttggcagaattggtcggatttgggatgagtgatgatgccaatcatatcaccagcccatcggtcggtggagaaggtgcggctcgtgccatggcagcggccttggcagatgcaggcattgatgcttgtgaagtgggttatatcaacgctcatggtaccagcacaccccaaggtgatgtcgctgaaagtcaagccattgagcgattgtttggtcaagatattttggtcagctcaaccaaatctatgacaggacatctgcttggagcggcaggtgcgattgaagcaatttttaccatacttgcactccaaaatcagcttctaccacccaccatcaatttagacaatcaagacgaagcatgtcggctagattatattgctcataccgctcgccgtgttgatggggtagaatttgccttgtcaaacagctttggatttggtggcccgaatggttcatcactatttcgccgatggcaggcgtgattgatttgtctgtgttgtcgccccaagcaaatacgcttggggttcttatattttagataaaatcatagatacaatggtaaatgtgtgttaagttcactataatgacacaattaatcattgaccatcgtcaattcatctggataacccatgccaaatcataccacaacacagatgcctaaaagcagcccatctgccaaaacctcgttattgctactgattatcgggctgatttttgcggcggcaaatatgcgttcgcctttggtaatgatgggttcaatcgtgcctatgctgtccgatgattttggcctatcatcagtacagattggctatcttggtgcgatgccgatgccgttatttgcatttggctcattaatggcagcggtactggcaaaaaaatttggacttgagaggatgatgattggcatgacgcttttattggcgttgggggtggcaatacgaaactggtttggggtgatagaattgtatgttggcacgctgattttatcgtttgccattgggatgctaaatgccctaactgcaccttttattaagcaatacgcccctaataacattgcacttgccacaggtgtgtttagtctaagtatgtctactttggcgggctttggtgcttggatggtggtgccatttgccaaaacatttggctggcaatttgcgatgagcagttgggcaatctttggtgtgattgccgcatggatttggtggttgatttatcggcataatcgtatggataatcttaaacttatgccagccttacccacgatcaagccaaccgctcatctagaaaaacccatcaatctttggcttcaaaaagccgcttggcaaatggcggttttacttgggcttcagtcgtttttattttatagcttggcaagttttttaccatccattggtatggcatttggggtaacactagatgaggcgatacgattgcctttcgtgtttcaggtcatggcaccacttgccattttatggctcacttggctttcacggcgtggcacatcgtttcagatcatttctgtggcaggttgtttgatgaatgctttgggcatatctgggctgttaatgatgccatctttgatgctgctttggtcggctttgatgggctttgggtgtgctttggtgtttaccttaagcttgatgatgttctcgcttcgtacgaccagtaccgaaaccgcgcgtgatttatccagtatggtgcaagcggtgggctatagcattgcgatgtttggtccgttgatgattggtaagctgtatcaatggcagggtgattggcaattgccgttgatggtattggtggttttgatgataattaatatcccatttgggctatgggcagccaatgagaccaaaattggctgatgtaggcaagactgattgtcaaacgaatagacacgatttggtagaggtagaatatgggattacaaccttggcattgggcggtgattggcatgctattgatgacaggtgagttatttatacccagctttgcgatgctttggtttggggtggcggctttggtgactgcgttgctgctttgggtagtgccgatggatttgttgagccaagtggtaatttggctgggtttatcgattgtggcgtgtattttgtggtttaggctgattcagccacgcatcaaaacacgcaccaaggcagggcttggcggctcggtgattattggtgagattggtatgattgtctcacctgtggtggcaaatggcttaggcgtagtcagattttctgtacccaaagtaggtgctgctgaatgggcgtgtcgaacacttgacggccattccatcgaagttggtacacgagtgattgtcaccgctgtgatgggcaatgagctgattgtcataccaaaataacgccaaaatttatttttatacataataacttttatacataataacaaggaaagctatggaatttaccgtcattattttggcactggttgctttggtagtattcaccatttataaaggcgtaaaaatggtgtcgcaaggcgaaaaatggatcattcagcgtttgggtaaatatcaccaaacacttgagccgggtctgaattttattattccttatgtggatgctgtcgcctataaagtaaccaccaaagacatcgtacttgatatcccaagccaagaggtcattacgcgtgataatgtggtcatcatcgccaatgcagtggcatatattaatattgtgcagcctgagcatgcagtctatggcatcgaaaattatgaacatggcattcgtaatttggtacaaacatccttacgctctatcatcggtgagatggatttggatgccgccttatccagtcgtgaccaaattaaagcacagctaaaacacgccatcagtgatgacatttctgattggggaattaccctaaaaactgtggaaatccaagacatcaagccatcagcgaccatgcaattggcgatggaggagcaagcggccgctgagcgtcaacgccgtgccaccgtcacccgtgccgatggtcaaaaacaagccgccatcttagaagcagatggccgcctagaagcctctcgccgtgatgctgaggctcaagtcgtcttggcgcgtggttctgaaaaatcgattcgtctgatttctcaggcaatggatggtaaagatatgcctgtggtgtatcttttgggcgaacaatacatcaaagcgatgaacgagatggcaaagtcaaataatgccaaaatggtggtactgcctgccgatattttaaatacggtcaagggtttggtgggtgataaatttaaagtctaaggcaagctaaattcgatcataacaatagccaccaaaatatcagtggttattgttatggataagataaatcaatggtcggtggcgattgccccttgtttttggagatagtcgatgatttctttggttttttgagttaacagtgtggcatcaccgcatgcctcgacatttaggcgaatgagcggttcggtattgcttgaacgcaaattaaaccgccaattaccaaaatccaagctcagtccatctaaggtatttttttggggattaaggtgggcgtatttttgttccagaccttggctgatggtagcagcattagttttatccagcctaaaattacgctcacctgaacttgggaaatcttgaatgtaatcatcaacaagctctgccaaggacttgcctgtgactgacaacagctcaattaatagcagccaaggaatcatgccactatcacaataaaaaaagtctttaaaataatggtgtgccgacatttcaccgccatagatggcttttgtttcacgcatgacttgcttgatgaatgaatgcccagatttactaagagcgggcgtaccttgcatctttttgatgacattttgagtgttataaatgacgcgtggatcataaacgatggtctgcttgggatatttttgtaaaaatgccgctgccagcataccaaccacataactgccatcaataaatcgtccgttttcatcaaacaaaaaacaacggtcaaaatccccatcaaatgccacaccaaagtccgctttgtgtgcgatgacggcatcacgggtagcggcttgattggcgatgatcatggggtttgggataccgttgggaaagttaccatcaggctgatgatgtattttaagcagctcaatcggtgaacctgctaagcgtacttcaagggtatcaatgacaggacctgccgagccattgccactgttgatgacgatttttttggggagaaatttgctcgtgtcaataaagctcatcagtttatcaatataagcggttttgtcggtgttttgggtgatgctgccttttttactttgaataaaattaccactttcagccaatgcacgcacctcggccaatccagtatcggcactgatggggcgtgagttttcacgcaccatttttaagccattataattgatgggattgtggcttgcagttacctcaatcccaccgatggtgttatagtgactggtcgcaaaatacacctcttcggtgcctgtcataccaaggtcaatcacatccacgccagcgtctgttatgccttggatggcggcaagtttcaggctatggcttgatggtctaatatctgagccgatgacgatggtaggatgctcggcggtgttttgagattttaggatttgggcaaaggcacgagcaatgcgatagctgatatgctcatcaagcgtcacacccagctcacctcggacatcatacgccttaaagcaagaaatggttattgcagaaaaatttgtcattgtcatggcttgatatcaaataaaaatgatgaaataaaaatatctagagcgtgcctgcctttgatatttacgataaaaaatgagagacatggctcattttcaaggaaaaatgcagtctgtgagtgtcatcagacaggtttttgacttttaagccgctcaattttaccatttttatacaaacatcgactaaaattgtaagtttcgtcaattggcgatcagtgattggtaaatgcggccgtgtttcaaaaactgatttgattgtaccatgatttttgataatgtgctaaatgccaaacaaggattcacggtcaaattaaaacatggcataagtataacaatgaatggcatagaatttatgagcatactggtactaaaatcttgaaaaatttgttatagtaagcttgttattgtgatgatgtaaattcaagcatggtcatgatatcgataccaatttaataaaataccaagaaaaccccaacaaacatgaactgaattcatttggagtatgatgatgaatattgcaaaaagtgtgactgaccttatcggtaaaaccccgcttgtcgaactcaatcgcctcaccgaaggcttatctgctcgtgtggtggtcaagcttgagtatgccaatccagcaagttcggtcaaggatcgcattgccctttctatgattgacgatgccgaaaaatcagggcttttgaccaaagacaccaccatcgttgaggcgaccagtggcaatacaggcattgggcttgccatggtggcagcggcacgaggttaccgcttggtgattaccatgcctgagagcatgagccttgagcgtcgtgcgttgcttcgtgcgtatggggccaagcttgtgttgacgccagcggctgagggcatgggtggggcgattgccaaagccaatgagcttgctgcccaagacggctattttatgccacgccaatttgataatttagccaatccacaaatccaccgtacaacaacagccgaagagatttgggcggatacagatggtcaggtggatatttttgtctcaggtgtgggtacaggtggtacagtgacaggtgtcggtgagacactcaaagccaaaaaagaagccattcaaattgttgcagttgagccattggcatcacctgtcttatcaggcggagaaaaaggcccgcacccaattcaaggcattggtgcagggtttatcccatcagtactcaatacggatatctatgatgaggtcatcaaagtcgctaatgaagatgcctttagtgtggcacgagatatggcagccaaagaaggcttgcttgttggtatctcatcaggtgcggcagtttcggcggcacttgaattggcggcacgagaagaaaacgcaggtaagcttatcgtcgttatcataccatcatcaggtgagcgttatttgtcaacagcattatttgctgatttggcacaatgagtatcttttaaattgaccaaactctccttgttgttattataacaataaggagatttttattggagggtgtatgacgccaaccgacaattttgatgatttgcttgcattgatggcacgccttcgcaccgattgcccttgggatgccaagcaaaccaacgccagtttacaaaaatatgccatcgaagaggtttatgagctgattgaagccattcagaccgatgatggctcagcatttgccaccgagcagctcaaaagtgagctgggcgatgtgctattgcaggtgatttttcatacgcatttatatcaagaggcggggcgttttgatatgtcggcggtgattttggcattacaagataagctgatccgtcgccatccgcatgtttttgagcaagaaaatttacaaaccgatgctgatgtcaaacgccgatgggatgagattaaagcccaagaaaaagcacatttggcggctttgggtcagcccatacgcctgttgtctgatgtcaaggcaggtagtgcactcatgcaatctcagcatttacaaggcaaagcagcaagcgttggctttgattggtcaaatctgcaaggtgtacttgataaactcaatgaagaattgggcgagctttatgagttattgcctttgggtgattttaattataaaacagataagctaagcgataatcaaaagcaaaaattatctgatgagctgggcgatgtgctgtttgtgttgaccaatttggcacgccatttggatattgatagcgagatggcacttcaaggcactgtcggtaaatttcgccgccgttttgcatttgttgagcagtcgctgatggatcagggtaaatcgtttgagaatagtgatttggcagaaatggatcgttattgggagatggcaaaggcaaatgaaacttaatactttatcacccatcgccttattatttgtcggtcttttgtgtgcaggctttggatatgccaatccgcccaaacagtgctatgctgatacaaaaagtgcctatcaagcactgataagtacccaaaaatccaaacgcctaaatatcaataccgcaagccaagctgactttataagcttggtgggcgtggggcataagaccgcccaagccatcgtggattatcggcacgagcatggcaaatttgactcagttcaatcactgatgaatgtcaaaggtattggacctgccattttaaataagaaccgtcaccgcttaagcgtggcaaattaatcttgagcaatcataaattttttagcccaactgaaaaaatacccaaaatcaaactggtatcaccccaattttggtgaaaatattggttttttattcgcttttttgatggataagcggtaaaataaaggatttacttcagtcagtttttgggcaatgccccagtaatcaaggagtaggcatgggcaaagtgcctaaaaagccaaaacaaaccaaaaagagtatttgtaccacacattcagccaaatcgctgcgactacaaaaaggcagtttgccgcacagtattgtcgaggtcatcggcacactacaaaaagcaggatttgatgcttatattgttggcggtggcgttagagacagcttacttggtttggcacctaaggattttgatgcggtgaccgatgcaagaccgcatgagattaaggcaatttttgggggtcgttgtcgtatcattgggcggcgttttcagttggcacatgtgtattcaggtcgtgagatgattgaggtggcgacttttcgcgctccgcccaaagacgatacacataccaccgaagatggcatgatcacccgtgataatgtttggggcgacatcgagcaagattttgcacgccgagattttagcattaacgcattgtattatcagccaattaagggtgaagtgctggatttttgtggtgcattaaaagacatcgacagtcatacgcttcgcttacttggtgatgccaaggtgcgtattgaagaagaccctgttcgtctgctgcgtgcgttgcgatttaaggcgaaactgggttttgaatttgatcaagatttggcaaatcaatttcatcaagacaattggacgcttttggagcaagtctctacccatcgtctttatgatgaaactcaaaaaatgttcggtggtggctatttgacgccgctgttgccactgttgtttgaacatggggcgatgtcaagtttgatgagctttgcacccaatgagccgacgcctttgatgatggtggtcgcccgaaataccgatcggcgtatcgcagcagacaaaagtgtcaatccagcatttttttatgcagcgatgctgtgggaaaattatctgtatcaattggcgaaatataaaaagcgtggcttaccgtttcatgaagcacagattaaggctgccgaaaaaaccattgacgcccagcgtatcaaaactgccatacctaagtttgccgaacaattcattacagatatttggttgcttcagcctaagcttgtcaatccaagggtgcgtgatatcgctaatttggagcgtctgccaaaatttcgtgccgcatttgattttttggtactcagagaaggttatgatacccatccattatctgagccgacccaaaatatgggtgcttggtggcaggcgtatcaggacgccagtgctgttgataaagcgatcatgattgaggcgtttggtacgcaagcaggcacgccaaagcgtcgccgtgatcgtaatgccaaaaaagataccaagactcgtgagcttgagcagcttaaagagttgtctttgcgtagtgacgatgagctaatcaaaacacgccctgaaccattatttgtggtggcgggtgcagaagatttggtcaaaaaaaccaaagcacgaaccaaattgccaacgcctgccgtgcctacgcctgtctttgagccagtgaattttacacaagctgattttgaaaaattgcttgccaatgatgagccgtatattccagcatctcgccatcgtaagcgtaaaccatcatccactttatccatcaaagagcgtgaacaagggttgatcaagcagtcagacgagcattggtctggctctaaacaatcggctcaaacaaaaaaaccatcacgccatcaatctaaacaagttgatggtgtcactgatattgagcctaagcttgtagaaaatcaagccaagccaaaaagaacacgccgccgtaaatctaatgccaaaccaaaggcagatagcatatgaccacttgttttattggacttggtggcaacattaccaatgaacttggcactcccaccgagcatatcatcaacgccgtacaagccttcaaacagtcgccacattttaccgatgtgaaaatgtcatcactgtatcaatccaaagcctttggcatcaccgaccaacccgattttattaatgcggtattaagtgccaataccagcttaccaccgcttgagttgcttgatttttgtcaaggtcttgaacagaccgccaaaagagtgcgattgcgtcattggggtgagcggtctttggatgtggatattttgttatatggtgataaacgcattcatcatgaacggctgaccgtgccacatcaaggcttatttgaacgaaattttgtgttaattccaatgcttgaaattgatgagtgtttgctggttaatgggcaaaaattggcggatttaaatgaaagtaacagctggcaaggtttgaataaactgacataagtttggataaactgccatcaaaggagcaacacatgacccccattgaaacgattatccaagccaccatgctaagtgccgaagaaattaaacagctatgactgaaacggtcatcacttaaacagccattaccctaaaaaggcaatcctatgagcgaccaagccccatcatcaatcacccccaaacccaaagcacccatcaccctatctactttaaacaaactaaaagcagagggtaaaacattttcttgcctaacttgttacgaggcaagttttgctcacgccatgcagttggcagacattgacaccattttaatcggtgatagtctgggcatggttgtccaaggacaaagctcaaccttgccagtgggcgttcaagacatggtttatcacactcaaaatgtggtgcgtggtaattctcatgccttaatcttatgcgatttgccattcatgagttatgccaccttatctgatgccatcaccagtgccaaggcggtcatgcaagcaggggcgaatgtggtcaaaattgaagggggcagcgagcttagcgacactgttaaggtcttgaccaataacggcgtgcctgtgtgcgtgcatttgggattaacgccgcagtcggtcaatgtctttggtggctataaagtacaaggtaaaacagacgcccaagcggataaattgatgagagactgtacggcggtggtgaatgctggggcgagtcttttgttgcttgaatgcgtgccagcaccgcttgccaaagccgttaccgagcggtttgatgtgcctgtcattggtattggggcgggtgtggatacagatgggcaagtgttggtcatgcacgacatgcttggcatttatacccgaaaacctgccaaatttgtcaagaattttttgaccgatgacagcaaccaaaccaaagacattgttggggcgtttaaggcctatcatcatgcagtcaagcagcgtgcctttccaacaaaacagcacagtttttaggataaaaacatgaacatctgtcacaccatcaaagacttaaaaaacaaattaaaccccttacgcaaccaaaaaatagccttagtcccaaccatgggcaatttacatgatggacatttatcccttgtgaatcttgccaagcaacatgccgatgttgtggtggtgagtatctttgtcaatcccactcagtttggggcgggtgaagactttgccagttacccacgcacgcttgatgacgattgccaaaaacttgccaaagctggcgtggcgttggtttttgccccaagtgtggacgagatgtaccctgtctatccgcccaatgttcaaatcctatcaggcagcatcagcaagatattatgtggtcagacacgccccacgcattttgacggtgtgggcttggtggtgagtaagctgtttaatatcgttcgtcctgatgtggcggtatttggcaaaaaagactaccagcaacttgccatcatttaccaattggtgcaagaattaaattttgagattgacattattggcggtgagattgtcagagccgatgacggtttggcgttatcgtctcgcaaccagtatttgaccgagcaagagcgtgccatcgccccacggctggcacaggccttacaacagcttgcaggtgggttaaagtctgcaaattttgctgattttgatatgatgatacaaaaaactaaagatgaattaactcatgatggttttacggtggattatttgcaagtactcaatcagcaactgcaacctgctagccgccatgataaaaacttggtgattttgaccgcttgttatttgggtggggcaagactgttggataatttggaagttgccttaaattaatgttaataatccatgttcatctaaacccatgttcatcaaacccatgttcatcaaacccatgttcatcaaacccatgtaactggttttgctcattttgctaaggaaatatgatgcccaaactcattgccccaaactcaatcattgtggtgtcagggcgttcaggttcaggaaaaacctccgtactcaacaccttagaagattttggctattatccgcttgataatttgcctttatccatcgtgccacttgccatagaaaaattggtcaatgacagccagattcatcgcattgctgtggggatagatgtccgcacccccaaagcggatttatccaactttggtcaagtgtatgacagcttgatacaaacctatggcaagaccgctttgagtgtgttatataccaccgcccaagatgatgtactggtcgcgcgctatgatgccactcgccgagtacatccattgatggcgatggctggcaatctgcccaatgccattcaaaaggaaactgcgctgcttgaaccgattgcctgccatgccgatatcaaaattgacaccagtttgttaaacattcatgagctaaaaaacagcctaagacaacatttgggcgtggataatcatatcatcgttaatgtgctgtcgtttgggtttaggcatggcacgccaaaagatgctgattttgtctttgatgtgcgtaccttgccaaacccacattggcagatggatttgcgtcctttgacagggcttgatgcacctgtgcaggaattttttgctcaattttctgccgtgcatgagatgacgcatgacatcagcacatttttattaaagtggctgcctgattttattgagaacaatcgccattttgtgaccattgccattggttgtacagggggtaagcaccgctcggtatttgtcagccaagcggtgggggagatattaactggtcatttgcctgataaaatgcaggtgaatgttaagcaccgtgaaaaatctttttggtgagtttatgaatgcgatgataaaaaaattattacaagggcaagcggtagagtggcgagcgttgggggaggttgccaaaaaaatttcatcaagtggtacgcctaaaacaggcattcctgaatactataataatggcgaaatcccttggcttcgtacccaagaagttaattttaatgatatttatgacacaggcgtaaaaattacagaaccaggtgttaaaaattcaagtgcaaaatggatacctgcaaattgcgttattatagcaatgtatggggcaactgttgggcgtgttggtatcaataaaattccaatgacaaccaatcaggcatgtgcaaatattgaagtaaatgaagaaattgctgaatatcgctacgtatattactgtttagccaatcaatatgaatatattaaatcactgggaacgggttctcaaaccaatattaacgctcagattgtcaaaaaacttaaaatcccaatcccacccctatctattcaaagtcaaatcgttgccattttggacacatttgacacgctgacccaatccatcagcgaaggtctgcccaaagaaataaagctgcgtcaaaagcaatatgagtattaccgtgagcagttattaaattttaaagcgacgatttaacaatttaacgatttaaacaatcatgattaaaaggttattattcatgaatgtcgaaacacccaacccaaaaaccgccaaacatatggcgacaagcgtgatttttatgctgtctgtgatggcaggtacgcccagctgggcaaccgatggcgatgctgttcaaaccagtaaagacagcaccaccgcacaaaaggccgatgagttttttgaattggcggttcgctatgatcaggcatcagattaccccatggcggtgcgtgaataccaaaaagcggccgaacttgggcattacgagcgatgtataatttggcggttgcctattttcaaggtgatggcatccagcaaaattatcaaaaagcacatgcgtggtatcaaaaagcggcggacatgggtcatgccagtgccaaatataatttgggcagcatgtatttttatgggcaaggggttgctgcaaatcaaagccacgcactcgcactctggcaacaggccgccaaacaaggcaacgcaaaagccgcccataatattggcgtgtattattacaaatcaaatcttgaacaaaataaagcagcagcaaaacagtggtttttggtctcgtgtcagttgggcttatctgatgggtgcatcaagcatgataattttgataaattaaccaaaaattaatgataaattaacgacaaatataaggtatcttatgattgattggtcaaaaatggacatgcgtgtttcacgcactgagattaaaaaatcccatgagcgtttgcaagcattatccgaaccgcttgccaaattgtccaaaaaacagcttgccaatttgccagtaagtgaatattttttggatgaattaaagcatttaaccaatatagacagccacgccgccaaaaaccgccaaatcaaacgagtgggtaaactcatcattgaagaaaaccgccacgcgctaacgcaggcgttatttgaatgtcaatttacccccgagcaaattgccaagattgaaacatggtatgatcgcctaaaactgtctgatgaaagcaccattaagcagtttgttaagcaatttaaaaaggcggaatataacagtatttatcaactgcttttgtggatagaatacgccaaacatttgggcgatgatgagctattggctgaaagcgtggcagattttgaaagttatgttaaagaggtggcgatattgtctaaatgatgatttgatggctgggttttgtcttggcatgagtacaatatcagccaatcaccaaaataccgatagatcatcggtattttgggcagacgaaataaacgcacagattggctgattttaacatttgtgggttattgtttttcttcacgcactttattaatcaaaaaatccacgacttgaggcactttggcatcttcaccggaaaccacatacttaccatgaacaaccacagcaggcacgccagatagaccatagcgtgtcgcagctgctttggcgcgctcgattttggtggttacggcaaaagaattatacaggctgtcaaattttgccttatcgatgcctttagaggcgtaccagttaccaagctcttgttgtgaactgataatgttgcgattgccatctttgtggacggcatcaaataatgcttgatgggttttttcttgggcgtctagttgctgggcagcataaaagccacgagcacccacttcccacactggattcatcgccgcaggtgtctgaaaaaatgccacatcagcagggcgtgtttttgcccatttttgcatatgtggctcaagatgatagcaatgtgggcaaccgtaccaaaaaaattcacgcaccacaatgacgtcacctgcgatagtttcaggattgggtaatactttatagtcctgaccttcgacaaagtttgcttgtgccaaagttgcaacacttagcatggttgtgagtaatgctgtttttaatgcaaatttcataaaatttccttgttgtaagataaagtaagataaagcctaacatctgatgatatcaatgttaaagacaaaaatctgatgagctatagtttatcgtattttttgtcaaatgtggcaacagttttcttaaggtttcgttgcagattgtgtaaattttttgccatcagtgtgcggcctacgctggtttattttggtatgatcttgatggtttcatcatggattgtatttgatttttaagagttttgggtgcttaagatgagtaatgatgaccttaaattgtaaaagtagtcaaataccgttaaaaatgataaaataaaaaaatttagccaaataaaacaaaaccaaaggatgatgccatgcaaagtcatgatactgccaccatcaacagcataaactctgccagcgataccaaccaagcgatcaataatgctgattttgacgaaattagtaaattcaccaaattggcggatgagtggtgggatcgcatgggtgcgtttaaatcattgcatgatatcaacccactgcgtctaaactggattgaagatcgtgtgaatgactgttatggttcatcgttggttgccaaatcggtggtagatatcggctgcggtggggggattttggcacattcgatggcggtgcgtggtgcgagcgttttagggattgacttgggtgatgaaaacctaaaagcggccggtatccacgccgccaaaacaggcatagatgggcttgattttcgctgcgttgctgcagaggagttggcggcagaacacgcttctggttttgatgtcgtgacttgtatggagatgcttgagcatgtgcctgaccctagtgcgattgtgcaggcgtgttatgatttattaaagccaggtggcgtgtgtgtgatgagtaccattaatcgcaacccaaaatcttatctgtttgcgatcattggtgctgaatatgtcttaaatttggtggataaagggacgcacgattggcataagttcatcacgccagcggagttagaccaaatggcgatgagcgttggttttcaaagatgtgatttgacgggtctgcattataatcctattacccagcattattggctgtctaataaaaatgttgatgtcaattatatgatggcatttaccaaaccaaacacacaaacagataccccaaaacacacctaaggaagctttatgacacagcccattcaagccgtgttctttgatttggacggtacattgattgataccgcacctgattttgttcgtatcattcagcagatgtgtgccgatgagggactatctgcccccagtgaagcagcgatacgagagcaggtgtcagcaggcgcgcgtgctatggttcagctgatgtttgccgagcaacttgggcaaatctgtgatgacgatccacgactattaagccgccgccaagcttttttggatcgttatgaaatcgatgtttgtgtagatagccgagtatttgaggggcttgaggtcttacttgaaaaactcgaggggtatcgtatcccttggggcattgttaccaataagccacgctatttgacagaaaacttattggacaagctaaatttatcatcacgatgtggtgttttggtctgtcctgatgatgtcaaaaatcccaaacctgaccctgagcctttatatttggcgtgccaaaaaattggcgttgaaccgttggcatgtatttatattggtgatcatcgccgagacattgaggcagggcgggctgctggtatgcagacagccatcgcagggtttggttatttatcggcagcggatttgtcaagtatcgatacttggggtgctgatgttatcatgcagacacccaaagcgttgacggattgggttttgcaacaagttttataaggtgactttcattgtcgcttaagtggattaccgttagacccaaaaggtattatattaccttattttcttctcataaatttcatatcaatttaacatagagctaacaaaaagctcaattagccactggataaaacatgacaaccatgcgttcacatgatgcaattcgtgattttcaattcaccaaagacagtctaaaagataaaattattttggtgacaggtgcaggcgatgggataggcaaagttgctgctttgacttatgccaaatgcggtgcaacggttcttttgctgggtaaaactcaatcaaaacttgaagtggtttatgatgaaattgaggcacttgggttggcgttgcctgccattttgcccatggatcttgagcgggcagattttgcacagatgcaaaagctggcaggcttaattgaaaaagaatttggacatcttgatggcgtgctacataatgcagccattttggggacattgacgccacttgagatgtacgatccgatcacctttgagcaggtcatgcgggtgaatatgacagccgtattcatgctgacccaaagcctaattccgctactgcgtgcagcccaaagcggctcggtggtatttacaagcagcagcgtgggtgcaagaccaagagcgttttggggtgcttatgcactctcaaaacaagcggttgaaggcatggcaaccattttcacccaagaaacccaaaacatgacagcacttcggtttaattgtatcaatcctggtgcaactcgtaccaatatgcgtgcacatgcttttccaggtgaggacccttatacacttaagacgcctgaggatatcatgccagtttatgtgtatttgatgacagatgaggcaagcggtattaaaggtcaagtgattgattgccaaccaaaaaacgcttagccgatttagccaacacaaataacatcattgttattatcaaatcagccttaacctacactctttaaaccagtcgtggcaaattttttaaccaaaacttcaccaaatgggtgttactgtgagtttgtttcaaaactttatgattattcttgtactgattttgacatcgagttttttctcgatttcagaaattgctttggcaggttcaagaaaaatcaaacttaaattactggcagaatcaggcgatgaccgtgccgagaaagtcttaaaattgcaagaaaattcagctgatttttttgccacttcacaaattggcctaaatgctgtcgccattttgggcggttcggttggtgaaagtgccttgcgtccttatttttccgaatggattggcttggtatatcaagggatttggcttgacagcatcgcttttttttcgtcgtttgttttggtaacactgctatttattttatatgctgacctgattcccaaacgcattgcaatgattaatcctgagcgagtggctttggtggtcatcaatccgattttatggacaattcgtgtggtcaagcccttggcatggatcatcaataccatcgcagatgtgacttttcggctttttaaatttgatacggctcgtgatgacagtatcacctttgatgatatttctgccattgttgatgctggggcagaggctggcgttttgatggaacaagaacagcactttatcgaaaatgtttttgaacttgaagaacgcaccgtgccatcatcgatgacggctcgtgaggatgtggtatattttgcactcagtgaaagcgaggagagtattcgtcaaaagattgccgattatccttattctaaatttttggtctgtaatgagcatatcgaccaagtcatcggttatgtcgataccaaggatattttggtacgaattttaagcgaacagccaatttttcagctgaatgaatctaccattcgtaatgtactgattattccagatacactcactttatccgagcttttggataaatttcgtgccagtaatgaaaaaatggcggtagtcattaatgaatatgcattggttgttgggctaattacactatcagatattatgatgactgtcatgggcgattgggcagccgctgagcctgaagatttacaaatcattcgccgtgatgaaaattcatggctgattgatgggattacgccgattgatgatgttaaacatgcccttgatattaatgagtttcctgattgggatcactatgagacgctggcgggctttattatgtatcgcctgcgtaagattccacgccctgcagactgggtagagcatgagggctttaaatttgaggtggtagatatcgaccattataagattgaccaacttttggtaactcgcctagagcaactgcccaagcacgaagactaagattcatcttctgcctttatgcacacaaagttcagtggttcattgtctgatttgataagcgattggcttcatcgacaagtatcattatcataaggagcctgtatggcatcaaatacacgatttggtttacccatttggtcaatgctcttgccattggtggcttgggggttattttttgtgggcataaaaacccatctgctgttacaaattttggggggcgtgtttttaattggtagtgtgttatcggcagtttatcacacagaggtggtcgcgcataaggtcggagagccttttggtaccattattttagcgttagccattaccatcattgaggtcgcactcatcatctcgctgatggtcgcaggcggggataatgcggcgtatttacctcgtgatacggtttttgcagcaattatgttgattttaaatgggattcttgggatgtcgctgatgattggcggtctaaaacatcgagaacaattttttgggcaaaaatctgccagcaccgcattaattacactggtctcaattttggtgatgaccttaattttaccaaattttaccacttccaccacgcaaggcacttattcatcagcacagcttatgtttgtggcggtggcctctttggtattgtatggttcattcatcatggttcagacagtgcgtcatcgtgattattttttggcagctgatgatgatttggatcaccatgcccaaccaccaagcacaaagattacaaccatcagctttatatttttgttaatctgtttgggcattgtggtcatgcttgccaagagcctaagccctagcattgaggcggcagttgcttatatgggtgcacctgtcgcgttggttggggtgatcattgcagcggtggtgttactgcccgagggattggcggcattaaatgcggcacgccacaatcgttttcagaccagcttaaacttagcattaggttcagcattggcaagtattggcttaactattcctgctgtcaccattgtttgcttaatttatgatattccattggtgctaggtttagatggtaaatctatggtattgcttggtttatcaacttttattgtcatgctgtcacttaatcaaggacgcacgaacattttatacggcattgtattgttggtgaatttatcggcgtatgttttcaccatcattgcaccataaatgactgcgattgtcgccccttgaattctagtcaaatgatgggcaatattttgggttgtctcatgaaaatatcgccactcatcttaatgttaaatcgtttatcattaagatgagttgttttttatcttgcattttaaaaattattatttataataactgctaatatgtttattactatttataattaaaaggaattgcggtgagtgtaactctaagacagctcaaagcctttttgttggtagctgaacaaaatagttttaccaaagcagccgagacattgtgtctcacacaatcagcattgtctggattaatcaaagagcttgaacagaatttgggtgtcaaattatttgaccgcacaactcgcaaactgcatttatctgatgctggtatgcgacttttgccacaagctcggcgtgtgcttaatgagatgtcagttttaaatgaaaaggtgaataacctaaaatcactgcatcaagggcatgtgcgtttggcagtttcgcaacaattatcagcaagcacgatgccaaaatttgtggcaaagttttgtgatattcacccaaatattcaagtgacactcaccgattgctcggttgatgatgtggtggagcatattgaaaatctagaagcagatttgggcgttgccccagagcgggtgcattctgatgatttgcaggcggtggtgttattttcttcgccattttatttggtgttgcctgccactcacccatttgccaaaaaagatgttttgcgttggacggatttattgaatgaacggctgattacgcttaatggcccgtttattaaaagtctacaaaatgaactgcctgctcaaatttcaagccgtatttttaactctgagtttgaggtaaattttttatcaactgcacttggaatgacccgaatgggacttggcgtaaccttatgcctattatacgctgctgaatgggtggagcaaaatggcttggtgatgcgtcctattgccgaccctgtggtagagcgtaaatttttattatatacgcacaaaaatcgctcattatcacctgcagcgttggcatttaaggagtttttagaacaaaatgcccatgaatttttagtcagtcattcaaaagtatcaggtatctaagctgccattgtgatgatacattgtgtgacaaattttatgccaaacttttgcccaaaagggttgaaatttgcattatactaaataagttttaatcaacttaacaattaaaaggatgcatcaatgtttgaacatgtaaccacttatgcaggcgacccaattttaggcttgatggataaatatgcccaagacccacgcactgacattaaagtcaatcttggtgtgggcgtgtactataccgaagatggtcaattgcctgtacttgaatgcgtcaaaaccgccgaatccaaaatcaccaatccacctcgtccacgaggatatttgccaatggatggtttgccaggttatcgtaaggcatgccaagatttgttatttggtaaaaatcatcctgcagttttagaggggcgtgttgccactattgcaactttgggcggttctggtgcgttaaaggttggtgctgattttatccatgagtggtttcctaatgccaaatgctatgtgtcagacccaacttgggcaaatcatgtgggtatttttgagggtgcaggttttgaggtggcaaagtatccttattatgatccaaaaactattggcgtaaaatttgatgagctgtgcgaatttttcaagactttaaatgaaaatgatgtagtgctactacacccatgttgccataacccaactggtgtggatttgacccgtgaacagtggaatgtgctattacaaatcgtcaaagataaaaaacttattccatttatggatattgcctatcaaggttttggcgatgatatggatggtgatgcgtatgccattcgtcgtgcggtggggctgggattgacggtatttgtctctaattcattttcaaaaaacttgtcactttatggtgagcgtgtgggcggtttatctgtcgttgcaccaaccaaagaagaagcagatgtggtacttggtcaattaaaatttaccgtccgtcgcatttattcaagtccagctgcacacggcaactatgttgttgatgcggtcatgaatgatgaagcattatttgcgttatggattggtgaggcatatgaaatgcgtgaccgcattcgtgatatgcgtcaaaaactccaagaagcattaagcaataaactgcctgagcgtgattttagctattttaccaaacagcgtggtatgtttagctttacaggactaaccaaagagcaagtgattcgtttgcgtgaagaatttgcggtatatatggttgaaaatgggcgtatgtgtgtggcaggtctgaataattctaatgtagaatatgttgccagtgctatggctgaagtgcttaagtaagctaagtcacctgtcataaaaccaagcaccaaatttttaaaaatttggtgctttttgacagttaaatgatagtcaagatgggctagtcttaggctaaaaaatcacacaatatcagagcaatcccaatttagcacaacaggttttaatgattgcgacaaatttcgtgatgtttcatgtgaaacctaaaacctaaaaggtcatttaaattaccccataaaaataaccataaatatcacaacacgcccaaatcttcgacgatttgggcgtgttgtttggcttaagcttacctgattaatagttaggcttggctgcgtagatactgggttagcaacgccacaggacgacctgaggcggtattggtgctaccactcttccaagcaggacctgcgatatcaagatgtacccaagcttgaccttctttgatgaacctttgcaagaaacatgctgcggtaactgaacctgcttcacgcccaccaatattttggacatcagcaatttttgaattaatctgctcatcataggcatcatctaaaggcatatgccaaaccaaatcacccgtatactcactggctgcttgcagggcaaagagtgcatcttcatcattactgtacatgcctgaacgaacgctgcccagtgcaatcacgcaagcaccagttaaggtagctgtatcgatgataatgcgtgcatcgtaatgctcttggacatagcaaagtgcatcacacagcaccaagcgaccttcggcatcggtgtttaaaatttcaacagtagtaccattcatagcggtaacaacatcacctgggcgagctgaacgagatgaaggcatattttcagcacaagcaagtacagcgaccaaatcaatttcaagtccagcttcggcgactgctcgcacagtacccaagatagaggcagcaccacccatatcaaatttcatctcttccatgccagcggcaggttttagtgagatgccacctgaatcaaaggttagacctttaccaaccaaagcaaatggcttatctagcttagcttttttatcggattttttggatttgccataatactcaataacggcaagtttgccttctgcatctgagccttgtgagacagcaagaaagcaccccatgccaagttttttcatgtctttttcattcagcacggtaaccgaaacggtatcggcataatccttggcaagttgtttggctttttttgcaagctcgctggggttaagcacattgggagcttcattggcgacatctcgtgcggtggtaataccagcagcagttgcttgagcaaatgcaagcgctttatcatagtcagtttgagcgtctttgttgctgatgatgacaatttcacgcaaagtatcggcatcttttggtttggttttgtgatgctcaaaacgatagcttgcaccaattaaggcggtgacaaattgtgtaaagtgaatttggcaaatggtatcaccccacaaaattgccgcactttgagaatttttaatcacatcataagttgccacggcaactttagcgatattatcagcaagcttatcaagtttacccacgccaacaatactgatggctggagatgcttggtcatctaaagcatagtcggtaacgcttttaccaagcgtgcctttaaagtggctttgctggataagtgctgtggcgcgtgatatatattgggcatcacccaaattacccaaaatttgaccttcatcgttaacaaagaccacaacaatgggtaagggtttgtttttggtggctttttttaaggtcagcgtatttttgacgctgatttgaaatgtatgtgctggcatatcttttccttattatatgtgaatgaccgaagctggtgttttggggtgatgatgcaccaacgccagtttccaagcttagtgtagcataaatggcgtcatgacaaaatcaaatttcatccaagatgcaaaatttatgggcttaaatttataggttgatacggggtgttttgatccatgtttcttggttggtatcaatgataagaccaagtgattttaagcgtttatcaatggcacatgatagggtgtatttgggctgaaaacattggcaacaaaataaacttagcaaatcacttaaaaccgttgtggttttttgttatcataagaaatttgttggccactttttggagcttgtgctttttgattttacgctgccatattttacgccgttatatgaccacacaagtcgcttcaaccactgccttagttttgggatttttggtagtgatattgctgggcggtcgtctgattcgctattttgggatggcggcagaaggtgggcttaatgttggcgttttgtttcgtctgattggttataattttccctattttcttgagctgattttaccgttgtctttttttattggtttaatgttggtatttgggcggttgtatacagatcatgagatgacggtaatgaatgccagtggtatcagccgagggcgtgtggcacgactgcttatgccgttggtggttgtgctgatgtgtattgaaggttgggtgtctatggtggctaagccttggggtatggagcgtgctaccaatatttggcaagagcagtcagtggctcaggtttttgatttgattcgcccccaagaattcatcagcagcggcgattatcacctgtatgtgggtgagatgggtgctaatcgtgagttcttaaaagatgtcatcatcattcagatgcatactgccgaaccaagtgatatccaatcaagacaatcccataaaagagattctatcatttttgccaaatctgccacacatgttgaaactggcaatgggcaaattcagctagacttgcaacaaggtcgacgctatgaagtagatccaacaagtcgccaatacagtcaaattggctttgaacgctatcgcatgactttatctgtcaagcctcctgaaggcaccagccacatacgcattgaaggcgtgagtaccactgaacttttgtcaatcattcaaggtcactccaagcgtgataatcctcaagaagcatacgccgagcttggctatcgtctaagcatgccttggctgattttattggcaatcttattggcgacacctttgtcttatgtgcgaccacgccaaggcagatggtataaactggtgccagcgattttgatttatgttgcgggcgtgcttgtggtaatttctttaaaagataccatcgccaaaggcaagctttcacccgtgatttatctggctgctttattgatgatgatggtcgtggcgatgtatctgaattaccatcagcaagtgatgatgcggcttcgtcttaggcgtcaaggtggagatgtggcatgaaatcatggattttaccaaaatatgtcatccgctcagcactgcttgccatggcaggtgctgtggtgggtttatggcttgtacagatggtatttgcttatttggccgagcttgataatatcagtgaaacatatacgctgaccgatgcactgctatttattttgtatcgctcgccttattttttggtgcaatttatcccaactggcacacttttgggggcagtcattggtttgggcttgcttgccaatcacagtgagcttatcgtgatgcgagctgctggcatgagcatatatcgtatcgtcagctgggcgatgttgcctgcggtcatttttgttgtcatatcgctgggtgtcaatcaatttgtcctgcctaccgccaatcagcatgccgctgccatcagagcagataccatttatgataagcttatcacgattgatggctattggtcagtcaatcatgatggcgataatcaagatgtggtttatatcagctatgccgacaacgaaggcgggcttggagaggtcaaacgatatcagctcaaagatggtcagctaatcactgcactcaaagcaaaatcaggcgtatatttgccacagtctgatgatgtgatgaatgcacaaaaagcccgctatacttggcagttatcaggcattgatgagattggcatcggtacatcacaagtgcaacaagcacacagcgaaggcaaaatactgaccttaccgattgcaccgaccgatgtgtatttattgaccaaagagcctgaagatttatcacttagcagtttgtacgcccacaggcagctcatggcacatcaaggcacacgctcactgcgtcatgaattggcattttggcaaaagctactttcgccctttgcggtactttcgttagtattggtggcatcatcatttgtctttggttcactgcgttcccaaggcttgggactgcgagtggtcttggcacttttaacgggtcttttatttagttatttgactgatttgacgggctttgtggctttggcaacgggtctttcgccactgttaatggcactggtgccgatcgtgctatcagcgatggcgggtatgtatttactaaatcgcaaatcaagctaaactgggtgtaacctaagtttagcttaatcggtgacgcttggcggtcgtgatgcaggtttgatagcgttcattgacacgggtggcaaaccaattggtatcaaagtctcggctaagcttgggccctgaaatgacaacttttggcataatggcataagtaggctctcgcccaaatttactggcaaacatatcattcaccgcacgataagtgatggttttttcaaaatcacgagttttttcttttttaaaatcagatcggatttgttgtgcgttgatgggttttgatgcggtagcaagtaaagcgatggcggcagtttcggtagaggatattttgcttatggggctgccatctttataaagcaataaatctccatcaatggctaagctttcaccacttaaagtagcgatccgctgctgaaaggcagcatttcggcttgaatacatacccgaattataatcagcaaaacggtataaaggcttgtcataatttgcctgatataccattaatcgatgtatgccgtaataaagcccgccatagcgtgtgtataaatcggcacgcaaatcccgatcgctcatgctggcacggcgatgtgctcgtgcgtagtcgatatgtacctgcatagaaccaagtgttgtgacagggttgatgcgttcatcaatgccttgtcctgagagttttgtgatgttggttaaaggggctattttataggttctggtaaaataatcaaaaatctctcggtatagctcatcaagctgtttttcggtttttacagctttgatttgtttgatgaagttgttttttggcgttgggcgtgtctcaagcatgttgcgaaatacgcctgccatatttttaccaagtttatcttctagcttgtcatcaatggcttttagggcagcattgcctaagtttgggacgctgggatcggcatgaaaatttgattcttggtcaatgacagcgatagcggtacagatattttgtgcggttttcggtagtgataattcatcaaaaatatcgccaatatcagttgcccatagcttggcgttattgacacgcttggggattaatttggtgatttgggcatcgctgagcgtaggtttgtctgtgatggtctgcttgactgcatcacagcctgacaaaaccacggcacacaataaaatactagtaggatacattttatgcatctggtctacatcccaaactatttacacaagaaacactaaagacagtggagcagatgacgctcaaaaaggcatcttatagtaatttgacagttaattttcgtcaagtgcttgtacaaaaatacaccatcgtgcaagaagtttgtaccaatttaagcacaatcattttggcacacactgtcaagcaatgcttcaggcaaattagctgctggtaaagatacttgggtcatcatgcaatcgcatcaacccttcttgctgcgttgaagcgataagtttgccatcttgccaaaattgaccatggtttagacccttggcgtggcttgtggtatcgctccacatgtcgtagagtagatattcggtcatatcaaaagggcgatggaaatgtatggaatggtcaatactagccatttgtagaccttgtgtcatcaggcttagcccatgactcattaaacctgtgctgaccaaataataatcagacacaaacgcaagtagtgcttgatgaatggcaactggctgctccccaatatcagcgatacgcacccaattggcttggcgtggacgctcaggcttgggtgtcacagggtctcgtggtgtgacggggcggatttcgacatgacgctgacgcataaatcttgctttgagtggttcgggaattttatgtaaataatccgctttgagttcttgctcggtttttaggctttcagggggtggataatcaggcatggtttcttggtaatcaagcccgccttccatgggtgaaaatgaggcaatcatcgaaaaaatgacctgttcattggtcgtatgattaccgtttttgtcggtggttggcacatattgcaccgcaatgacttctcgagctgataaactgcgtccatcacgtaagcggcgtacttgatagatgactggtagacgaatatcgccacctcgtaaaaaataaccatgtaggctatgacaaggtttatcaatcgttaatgtgttagcaccagcaagcagcgcttgggcaagtacttgtccaccaaacactctaggcccaacatagtcaaaacttggaccttcaaaaacatcatcaccaatgcgttttagatgtagagtatttaatagatctgtgatttgtgtcttgacagcttcaggtgctagagcatagcgttcaaaagaaaatttcatatgactcattaagtgttgcgtgttggttgactgatattatcatcaatttggttgggtgatgaccttaaaatatctttggcataaattaaaaactgtcaaaattataccacttttttatcaattttttaggtaaaaaatccaaacaatgatagaataaaaattcacttctttgtattgattaatttatgcaaaaacttgtaaatttgttcaaaaaatctggcagccaaccaagtgcgttacccaaaccgccccaaaatagccaagatcatggcaatgaacgcacaccaagcccttatcgccgtgcttcaaccaaaggattatcgcttgtggttaagccagctttattaggtgagataccaaagattgatgataaagtaccgactttttatgtgattcggtcgtattcacgctcaaacagtctgcttgttggtatgcaaaccgaggcactgggtttacctgcagcattagcagaggtgcatgctgaacagattcatgaaacttctgccatgatttttttaaaagaccgtcgtacaaaaagcacaaataggcatgtacctcgtcttaaacgactgatacaagcttgccttgataatcctgagctaaaaattaatctggtgcctgtgaccattctgtgggggcgagcaccagataaagaggaatctttatttcgcttactgatggcagatgagtgggagtcgccttcaaaagccaaacagttgtttaatattggtgtgatgggtcgtgatacttttatccatttttcccaagcaaaagatttacaaaccctaattgcccaaactcaagcatctggcgaagatggcatgacgatcgccattgcacagcgtcttcaaggttatttggacaaacaacgcaccagcatcgtcggccctgatttatctgataaaagaaatgtggcaggtgaaattttatcctcacctaaagtggtaaaagccattgaagagcaagcagcgatatctggtaaatccatcgccgccgttaaagcagaagctcagggctatttgggcgagattaccagcaattattcacattcagtggtgcgtttttttgaccattttttaacttggctttggacacggctgtatgatggcgttcaagtgcgtcattttgagcgtgtgcgtacacttgcaccagattatcaggttgtttatgttccatgtcatagaagccatgttgattatcttttgttatcgtacgtgatttataagcggggtttgcgtattccgcatgtggcagcgggtgagaatctcaatattcccatactcggagaattgttaagaagcgggggtgcattttttatgcgtcgcagctttaaaggcaatacactgtatagcactgtttttaaagagtatgtacatagtttgatgcagcgtcaagcaccgatagagtatttcattgaaggagggcgttcacgcacaggtcgtctgttgccacctaagcttggtatgcttgcgatgacagtcaacagccatttgcgtaaacctgccaaacctgttgtatttatcccagcttatatcagctatgaacgcatcatggagggagcaacttatgtgggagaactcaaaggtaaacccaaagaaagcgaaaatttacttggcttattaaaaacggcacgcaaaattgagcgtatctttgggacggtgcatttgtcatttggcagtcctttatatttgacagactttatggaaaaatttcaggtcaacgcatgcgatgatagtgatgaaaacaccaaaaaagtccacgccatggttcaaaacttgggcgtcaaggtcatgcaaaatatcaataaagccgctgtggtgaatcctgtttcgctattggcattggccctgctgtcaacaccaaatgctgcacttgatgaagcccaatgccttgaacaaatccgtctgtatcagcacattgcccaagccttgccttatgatgatgacacccatgtcaccgatatgacaccaaggcagattttaaattatggggtgaagcttaagctcattgaacgcacgccacatattttgggtgatatgattcgtgtggcagataagcaagtgccacttttatcttattttaagaataatattttgcatgtatttatcatcgcaagtttactggcagcattggtacaaagaaatggtcgtatcagtcatcaaaagttagatggtattactgagcttttatatccatttttgcaaagtgagttatttttaaaaatatcacttaaaaatatcattgaaaaagttcatcaagtgctaaaattactgattgaacaagaggtaattgttgagctaggtcagggcattgtgggcagtcctgagggcaattcacaggcttatcaaaaactgatcgtactggcaagtccagcccagcaaagtcttgagcgttactttatggcattaaccttgctttccaaacaaggttcagaccgtctgacgaccgaacaggtggtgactttatgccatgttgtcggtcagcgtgtatcggtgctgcatgccgatgatttaccagatatgtttgataaagcattgtttacaagctttattgatactttggttcgcatgggttatatcagtatcaatacagagaccaatttattatcctttgatgagcgtattgaccgcattgctgaatttgcaaagtttgtactacagccagatatgatgcaagtactcacccataccgcaagcctttcttctgatgagctaggtttggcgatggcaagcatggagaaaaaacgcaagtttgggataagatagcaggcggtttttttgctaagtttgaataaaaaagtttacacaccaaccaattgtcattagagtgaaaatgattatgaacaccattacccatgccatcattcccaccgcaggctttggtactcgtatgctgcctttatcaaaagctgtacccaaagagctgttgccactgggtgataaacctgctattcattatgtggttatggaggcggtgcgtgcgggcattaaaaccattgtgttggtcaatcatgctcaaaagcaggcgattgaaaactattttgatatcaataccgaacttgatagccagttacgccaaaaaggcaaagatggcttggcagatggcctaaactttttacccaaagatgtacgcattgtcagtgtgcgtcaaggttatccgttggggcttggtcatgcagtgctacaagggcgtgctgtggtgggcgataatccatttgttgtgctgttgcctgatgtcgtgttagatccatttacgaccgattttagggcggataacttggcatatatgatgacaagatttgcccaaactggccgcagtcaaattttggttgaacctgtggcagatagtcaggtgcataaatatggcattgctcggctaaaggatcggcaaagtgtacaaaaatcggataccaatcacccatttgatgtactgggttttgtcgaaaaaccaagtttggatcttgcaccgtccaatcttgctgtagtggggcggtatgtatttcgccctgaaatttttgagtatttggcaaaaaccaagccaagcgtaggcggtgagattcagctcaccgatgccatcgatgcactcatcagccagcagggtatggatgtggtaacaataaaaggggcaagctttgacgctggtgatatgacaagctatattcaggcatttgcttattttgccagtcaagtcgatcagtcgttttaatttttagcaaaaccaaaaaacaaggacgattgatgaatacttggcatgacttaaaaagacttgctcactcacccattaatctgcagcattattttaccgctgatagcaaccgtggccaaaaattttcagcgacagcgtgtgatatttatatggattttagtaagcaggccattgatgatgaaagtttgcttaagctgatacagcttgctgatgcatgtgaattatcacaaaaaattaaggcattattggcaggtgaaaaggtcaatgataccgagcaaagggcggcactgcataccgcattgcgtttaccaaaaggtgagtcgcttatcgttgatggcgtggatgttggggagcaggtgcatgatagtttagataaatgtgaagccttggttcatcgtatccgtagcggtatttggcgtggctattcaggcaaggcgatccgtgatgtggtgaatattggcgtcggagggtcggacttaggtccgttgatggcaacaacagcactgtctgagtgggcagatactgatatccatgttcactttgtttctaatatggatggcacacaattagaaagtttattaaaaaaactcaatccgcagacaactttatttatcatatcatcaaaatcctttggtacggtagatactttatccaatgccaaaacagcattaagctggttgctggccgcttatgcacataagccaacaattttacgccgtcattttattggtatatccacacgacctgacaagatgagtgattggggcattcatccagacaatcagcttttattatgggattgggttggtggtaggtttagtatgtggtcagcgattggacttgcgattgcggtgcgtatcggtatggctaattttcgcgcattattggcaggcgcacatgagatggataagcactttgcacaggcagatttttataaaaatttgcctgtactgttaggcctcattggtgtttggaacgcaacttttttgggtattaatgcacatacagtcttgccttatgatggtcgattgagccattttcccaactatttaacccagcttgaaatggaatctaacggtaaatcggtcaaacgcacaggagaatcggtcaattataggacttgcccaattttatggggagacattggctcaaatgcacaacatgcgttttatcaattactccatcaaggaacacagcgggtgtcttgtgattttattaccccaattcatcgctataatgatactcaaatcataaataactctttggtttaccagcataaactgtcattggccaattgtttggcacagtctcaagtcctcgcctttggcaacgctgcactaccgtatggcgtggcaaatgtggcagatgatttggcaaaatttaaaaaatatcggggcaatcagccttccacaacgctgttattgggtgatttaaaccccaaaactttaggggcattaattgctttgtatgagcataaagtgtatgtcatgagcgtactttggcaaatcaatccttttgatcaatggggcgtggaagttggtaaagtgatggcaaatcgtgtctatgacgagctgatcagtaagacaaatacagactgcttcgaccattcgaccaatacgcttttgtctgtcatcaagcagtcaaggataatcaatgaataataatgcctatgtgattggccatcaacacgaagcgattaatacttgtctttggttggcaagcatgaaccaaacggtttatttgttggctgatgagccgtcagttttacaaacgcttgaatattatcaatgcgaccatcagatgaatacattatggcagctgtattgtgttcaacaaaaaattatcatcacagacagtcaaagacaggcatttttatcatcggctcaagctggggttttgtggttatttttagatgatgtggatgatatcacgcttagccatatcatacatgtgctagacagtccgcacagtcggattattttaagcggtgtgcaaaagcttggtaagattgataagattgccaaacaatttaaatcatcttgggtgtattatttgcccatcagctttatgaaagatggtgctaattataatgcgttttatcattcggatttggtgatgattggtgaaaaaaccgcaggcagtgttgcttattgccagatattattaagcttaaaaacctatgccaagcattgccaagttgctgatattttaacggtggaatttgcccgaagtactttgatggcgatgttggcaactcggctgtcttttatgaatgagatggcaagacttgctgataatcaaggggtaaatatcaaatcagttgaacgcatcattgcccaagatggtcgtatcggttcggcttatctgtcggcaggatggggctttggtggcaagacattgccacgagagcttgagcttttaatggataagtttaaacaaaaccgtgtcgacacttcgcttatcagtgctgtcagtcacatcaataacgaccaaaaagagctgatttttcgtaagttttggcaatattttaatggttttattgagcataaaacagtcatgatttggggagcaggttatcgaaatggtgcatcacgcatgattaattctgccattcatccattgattgagctgctttggtcgtatggcatttgtacgctcgtttttgcacataataccgcctttgaaatgcaatcaacttatggcgatcatccattgttaagattgactgatgatccttatcaggatttggtacaagctgatgcactgttcatcatcaattggtctttattaaccaagcctgatattcatgtgctcaatcaaattaacattgcaatttttgatgccaaaaatgttttagatgatgaacaaatcgccatgctgacagcaccttattatggtattgggcgagaaaagtattcatagcagatgccattgattttaatttgcctgatggttaaatctaatcatggaattaacaatctttccaacctttccaatctctccactctctgcattctttttaagttgggcatacttttgccatgctttattttggcataactgctataagcccattgctactttttatcatttatccatatgtccaataatgtgctttatgtaatttaggcacactattaactcgtgccactgttaacattcagcataaaaatcttaacaatgaatcaaagcatcgtattggctgttaaatgataagcttatatttatttaaattcagactaaatgattgtaatatggacatatcaaggttgaaatcaaaaattttggagagttatgtacgataatgataaaaaattgaccaccatcgtaggggtgttgtatacggtgtcttatattgccatatggttggtcagtggctatattttatggggctggattggtgtgacaggatttactcgtgcgatactttggctgatcgcttggatgattgtgggtacgattgctgatagaattctgataccgattattttgaccgtcgtggttgggttattttctatcttttttgaaaaaaggcgataatttggttattttttcacaaaaaatcatgattttttttgtaaactatctaaaatatcaattatgttatattatgtgataaaagatgggcatgcttaagttttggattgcaaaaatcctaatatcatcactgaccaaagctgtgatgatatcaaaactttatcaaagttcttagggtattatcaagatatcataccaaatgaatacttacccaacttactataaaaatcaaatgatatgactgtgattttattatcatagatacaaaaatcaaaacgcatgagccaaaggtatgatgaatgaatacaaaatttcgcacacattatgacaatctaaatgtcgccagaaacgctgacattgcggtgatttggtgggataggggtcaagccagtgcgattaagctaaatttttatgtgggcaatcgctgactttattttatttgtgccagttggaacaattcgtggtctaatgtatttattttaaggagataatgatgagatttttattggttggatgcttggcaaccttatttttacttgggtgtggtaataattctagtcaagaattagagacgaataccattgaacaatcaagcccaagaattacaataaaaaatgaaatgatcgaagctcaaccgttgccagagacaggggcaaccaacaaacctaatttgtatggcgattcacctttacaaataaaaaccaactcaggaagtcattattgggtaaaaattgtcaatgcttatgacgagcgagaagagctggtgagttattttatccgtggtggagaaacattagatgttactctgcccgtgggaagttatgtcgtgaaatatgcttatggagatacttggtatggcgaagagtatttatttggcgaaaatacaggttattccaaggcggatgaagtgtttgaattttatcacaatcaaggctatgtcattgagcttattcaacaattaaatggcaatttacacacaaccataattgacgaaagtcagttttaggagcttttatgaaaaaatttatcttagcaggtttattattggcaagtggtcaaatggcactggcggcgaattggatgtccactggtgttagtagtaatggcaaagagacctatgaagtggactatgacagtatctcggcttatcattttaatagttatgataaaaacagctattatgtcaccgcttgggtaaaattagattatcccaccgcccaaaaattaaaggatggtcgcttgtatcgtcaaacaaaaggtcttttgtatgttgattgcttgggtaaaagagtgacttggggtgatacggtattttatgacagtaaaggcaatgtggttgatagtgggcgtaattatgtcaatacttattcatccagcaattggaataggatggttccagatacgattggagaggatgtgtcaaaattcatctgtggcgtgtatgatgccaaatccaaatcccaaaccaaataaggataatttataaaaacttgatccaaactcactttatccaccttattattatccaccctcaccgcccatgccatatgtccctgacctgtttggggcatatggcaaaggtgcggtttatgggtgattgacaaggctggtatatcatagtattttaattgcttttatgataaacacagggacaactgacatgaaaaagattgatacaagcccaagcaatagcgagcattatttatccaaaaaaatcttggtaacaggcggagcgggttatatcggctcacatactttgattgagctgatacaggcgggatttgtgccagtggtgtatgataatttatccaattcaagttttgttgcagtgcagcgagttgagcaaattgttggcaaacatattgaatttattcaaggtgatgttttggataaaacgcatcttgacgctgtttttaaggcacatcagttttttgctgtagttcattttgcagggctaaaagctgtgggagaaagcaccaaaaatcccttaaaatattatcaaaataatgttgtcggcacactcagtctgttagagctgatggcaaaatatggggttaaaaattgcgttttttcatcatcggcaaccgtttatggcagctcaaatcgcctaccaatcaccgaggatatgccgcgtttttgtaccagtccttatggtcaaagtaaattgatggtagagcatatattggaggatttggtgaatgctgatgatacatggaatgttgtctgtttgaggtattttaatccaattggtgcacatgaaagtgggcgaattggtgaggatccaaccgatattccaaataacctgatgccatacatcagtcaagtggcggtaggtaatcttaaacagctgtctgtatttggcaatgattatgagacacctgacggtacgggggtgcgagattatattcatgtggtggatttggcaaaaggtcatgtggcagcactgcattatttggttgggcaatctgtgggcattggattttgtcccatcaaccttggcacaggtcaaggaacttcggttttacagcttattaaggcgtttgagtcaaatactggtcaaagcgtaccgtatgttattaccagcagacgcacaggtgacattgcagcctattatgccagtgctgataaagccaaagctatacttaactggacagcagagcttgatattgagcgtatgtgcgtagatacatggcggtggcagtcaaataatccacacggctatttatcctaacaaatcctgtcaaaagttttgttaatgctggttgtgggcattgataggtgcactatctacgcacaatattttatcttgttctactcaactgtgactgacttggcaagatttctgggcttatccacatccgtgcctttgaccagtgccacatgatatgccaataattgcacagggatggtatgcacaatcggcgatagtgtaccgatatggcgtggtgtgcgaatgatatgaatgccttcgctggcagtataatcactatccaaatcagataatacaaataactcaccaccacgagcagagacctcttgcatattggctttgactttatcaagtagtccatcattgggtgatatgacgacgacgggcatgttttcatcaaccagtgccaaaggaccgtgcttaagctctccagcaggataagcctcagcatgaatgtaggtgagttcttttaattttaaagcaccttcaagggcaatcggataatgaataccacgacctaaaaataaagcacttggcttgttggcaaaactttgcgcccatgatgcaagttgtggttctaagtttagggcatgttggatactgcctggtaataaccgcaaatcctcggcgtagtcttgtgcctgtgattcatccacatgaccacgcaagatacctaaagtgaccgcaagaccaaataacaccaccagctgtgtggtgaatgccttggtggatgccacgccaatctcagcaccagcacgcgtgaagatggcaagtgtactggtgcgtggcaaggccgattccatgacattgcaaatggacaagctgtagcgatgaccttgtgccatggcatatttaagtgcttccatggtatctaaagtttcacctgattggctgatggtaatgaccagctcgtcggggtctgagatgacatcacggtaacggtattcactggcaatttcaacatcgcaacggattttggcaatactttcaagataatgtttgccagtgagtgctgcataatatgaagtaccgcacgccaaaattttaatactttgaattttggcaaagatttcaggcgcctcttcaccgaagttatcagcaacaaatccaccttctaaaaaaatttcggcagtgtcagaaactgctcgtggctgttcattgatttctttttgcataaagtggctataaggaccaagctccaaggatgctaaagacatctcagaggttttaatgctgcgattgacctgattgccgtctttatcaagtagtttttggataccatcagcttgaagtagggcaatatcgccatcttctagataagtgacacggcgagtaaaggcaatgactgctgagacatcagacgcaacaaaaacctcattatcgccaaatgcaactaacagcgggcaccccatgcgtgcgatgaccatttgatttggtgcatcattagcgataactgcgatggcataagcaccatgaaatcttgagcaagctgtttggacggcatggtataaatcaccgccattggtggtatattcttgatgtacactgtgagcgataacctcggtatcagtttgtgattcaaattcataatccaagtgctgaaggcgtgtgcgttcggtctcaaaattttcaataatcccattatgtacaaccgagataagccctgctgaaatgtgtgggtgggcgttgggtttggtaacaccgccatgggttgcccagcgggtatgaccgatacctgtcagaccatgaatttgtttttgtttggcagcttcttccatcagtgcaacccgccccacacggcgtacacggcggatgcctgattcggtttgcacagcgatgcctgatgagtcatagccacgatattctaagcgttttagcccatctgttaaaaaatctaccacattgtgatgtgtccgaatggcaccaacgataccgcacataagccgttccttagtctctgattaaattaggtaaattatagcataccaaatggtagatgtcgctttttgtcggtaagaatcaatcagttaaacccaatcgttgggcatttgtaaatttaaagttcatccccatatttctttgcatatcgttcattaactattcaatcagataaattttggtaggcaaattatgacaactcaaactcaacacacgcctaagcgtgattatcgtcagcgtttttttattgatggctcggtggtgcgtggcgatgtggtcaagctaaccgatgcttatcaaaccgtcatcacccaaaaagactatcccgttgcccttaaagcattgctcggcgagatgcttgtttcggcaagtttgttgattagcacactaaaaatagacggcaaattatccattcagctacaaagctccgattctgatgctcgcctaaattgggcaatggcagagtgtgatcacacaggttcggtgcgtgctttggcagggtttgatgatactaatcagaatcaaacagtatggcaacacctaaaatctgccgatgaagcctttggtgagcttggcaaaggggttttgttcatcagtatccaccctgataatggcgaggcttaccaagggattgttgagcgtgtcagcgacagcttgggtgagtgtttggcacattatcaaagacaatctgcccagattccaaccatcattaagcttgccaccaatgagacgacagcaggcggcatattggtgcaactattgccccaaagtgatgctgataaagaggctgaccctgatttatgggaccgtttgacagcactcaccgatacactaaagacagacgaactcaccgatttggacgccaatgagattttgtatcggctatatcatgaagaagatgtggttttgccaagtttgacaccgctacaatttgcctgtacttgctcaagccaaaaaagtgaaggtgctatcttacagcttggctatgacgaagccaaacaagctgcagcggcacaaggcggtgtattgacgcttgattgtggtttttgtggcagagaatatcggtttgatgatcaagcgttagcccagctgtttgctgatggcttatcaaatcatcataagtaagcattttcatccattttttagatgcttaagccgttttattccaagcattgattaaagcaagttaattcaatcgtatttttgataaaacggtttatcatcttaaccaaatggcacatggcttttattgatcatgtgtcatttgccatgcttgccttaccattgtcgtttgatttgggtattataaagccccacataaccctcttttttatcaatccctgcatattcaagactggcatcttcatagcgtttaaacttatacaccgcatcattcatcaccgcttcatcaaacacatttaatgacacaagcaaagaaaaatccgcctgcgtaagccctgttactcgggtaaacagctcaggttcaagcaccgtaatcacatcttttaaactgtgttctcgataatctgataaatacataaaaatcggaatgcgtgtggcaaatttaatcaatttttcttggatttgttttcgcaaagatttttgctttttttcttcatcgcttaatgtctttttatcttcttttgatagctcgccatcattgtctttggctttttcttttaagcctttgattttttcagagcggttaatgacgacttcaatatcatcatttaggcttctaaactcttcaattttcatcaaagcatccatggcttcttgatctactgacttatattacttatgaattaaaatttgatattgctaaaatatcatgatataatgatttatttttaatataaaattatattatgtcattaaattacaataatctttggaaactactgattgacaaagacctaaaacgcactgacctcatcaatcttgcaaatatcagcagtaatgttttggctcgtatgggtaaaaatgaacctgtgtccttagaaagtttagaaaagatttgtattgcccttgattgttcaatacaagatgttttgactattgagaaaggagagtagaatgtctttgtttattgatactaaaaatatcccaaaccaaatcacaacaaccaatacaaaccctttaaaagttatttccttattttcaggttgtggcggtatggatttgggttttattggtaattttaatagtcttggtaatttttatccaaaacaaccatttgaaattatttttgccaatgatatttttgagaaagcttgccaaacttatcagcataattttaatcataatattatttgccaagatatatccacaattgatgatggtgatataccaaaagcagatattgttattggtggatttccctgtcaagattttagcttagcaggcaaaagaaaaggtctggacagtgagcgtggcaaattatatttacaaatgaaacgagtaataaagatagccaatccaaaagcctttgttgctgaaaatgttgatggtatccgaaaagcaaaaggtttaagtaaaaatgatgcttctgcattggatgtcattatcaaagatttttcccaaattggttataatgtggtttaccaagtattaaatgccagtcattatggtgttgctcaaaatagagttagggtaattattgttggtattcgtaaagatattgataaaaaaatgaaatacccaaaaccactatttggtgaattatccgatagtcaaaaacctgttattacttcaaaacaagcaatagatgatttatgggaattattagatgataatatcaacagccattcaaaaaatcattattccaaagcaaaattttatcccaataaaaaactgcaagggaattgtcaaataaacgcagacaagccagccccaaccattcgggcagaacatcacggaaatattgaagcccactaccgttcaaccaacaaaaaatcaccatatgatatgcagtattggcgtagattaactgttagagaatgtgcaagattacaatcttttcctgatgattttatttttccaacatcagcatcatcaagttatgtacaagtgggtaatgcggttccaccaattatggcgtggcatattgcaaatgccctatatcaatcagtctttgagtaaagatttgagtttatctcttaacttttctttatcaatttttgataattgttcatagtgggctaataatttatcagtatacatgattaatgtttcattaaaccaaggtgagcgactggttaaagttaaatttttatccaacaccacctttaaccattgttcaacgagtgttattttccagtttctaatcagttgatttttattatcccattcagattgagttattttaaaaataagtgagttgttttcagaaataaaattcttcttattccaattttttaatgtattaaaagaaacttgtggtcttgggcttctatctgggaattgtactttttcggtaatgctattcaagtaaaatcctgtggtaatttcaattggttttccttgtttgataaaaataacccattcataagggttgatttgttgcacacttgatcccggtatttcatttttcttagtagattttaattctacactaaaaaactctgtttctttcccattggataattctataaaaatatctggattggtataaaccgaatttgattttttagattttatcaattttttaagtggttcggtcaattcatcttgtaaataaacctgtcttatgtgaataaacttcattgatgggtatttaaaaatctgagtttcttgatgaatttctaaattacaatctgttgatacaattgggttgcgtaacataaaatctttgatgatagacttggcttgtttatctgaattggcttcatcaagatgaaaaaccactttacctaaattttctaaaaggtcagtgttattttccaattcttttagataaaccaacataaatacatcaaaaatagagaaattcatcttttatctcaactctaaggggattgtgatctatcataattactatagttgactcaaaataactaaaatattagctaataaggtatggatgcttcattagagtattttagcatgaaaggattttttcaggaagtctattaagagatatataccaaccattttacattgtggcaataattttactgatgtattggtatcctactttattttagatgaccatataatcacgcctttggataagcgtttcgctgatgaacttccattcactaaatacaatgggatttccatttaaatcttttagcgttaaagcatcgccacccacgatattttgacccagcaaatacttaacgatcttgatgatatttgggtcggtttctttaaaatgcgtttgataatgttcggtaaataaatttaataatcgctcacggcattcatgacaattatcgggcaatatttctatgccataaattgatgaaaccgccccaatggcataaaagccgtaattaaaggcttggtgtttctttttgattttttttggtggataatagttcaagaacggcatttaattttcggcttaaaatctctgccaaaaaattgccattgccacacgaaggctccaaaaaagtagcggtgatgttgtgccaaatcgtctctggcaatagatttagcattgcgtttacttctcgctcggcggtaaacacttcgccaaaatcggctactcgctttttggatttgacttgtttgttgctcgcttggattggggcggtatcagtcattttgcaccgccttttggacacagtttagagacgaaaaaagcccacataaaagcaggctttggtagaaaaagaaaaattagggcgtcaaggggttgacaagttatgtcatgtgcagataatcgttgacgcttgacgcttgacgcttgacgcttgacgcttgacgcttgacgcttgacgcttgacgcttgacgcttgacgcttgacgcttgacgcttgacgcttgacgcttgacgcttgacgcttgacgcttgacgcttgacgcttgacgcttgacgcttgacgcttgacgcttgacgcttgacgcttgacgcttgacgcttgacgcttgacgcttgacgcttgacgcttgacgcttgacgcttgaagacggtttaaaaagacggtaaacatgttatgactggttgatgatttttgccaatatgttttgccattttagcacaaattttaagttggcataaaatttattgacgctttagtaaaacataaaccaactaagcatgaaaattaaaatcgccgccatcacccctgccaacacatcatcaatcaatatcccaaatccgccagagacatttttatccacccatttaatcggagggggcttgatgatatcaaaaaagcgaaacagagcaaaagggacaatgaataataacgcagtgcttgggtggtgatgctctaagccagttttagctgcattttgtgtttgagcaagcaaccacacacttggcaaaagcgaaatccacatgcccacccattcatcaaagacaatgtgtgggtcatcatgtacgcccatcagctttgaggttttgccacacacataactgccaaccaaacagccaaccaccacaactgccaaaaacccccaaagccccaacaaaagcatgggcaaagcaatcataagcccgcccactgttccccaagtgccgggggcttttttaggcaaacctgtaccaagcccaaccccaagccaataaatcgccttctcccaagccgtggcggtggcagggcaaggtgggcaagggtttgcttgacgaatgtcgggtttgtgattggtcattgcttttcttattttaccgttatcctatttttaccgtcatctcatgttatgtttcccatgttatcgctggtttatcggtcatgcgatgttaacgatggtcatttttgatggggcaagtttttaatggggtaagttttttaatggggtaagtttaagtggtgcgatttaaaaatgctcccacccttgtactgttaaatccactttttgatgatgattcatcaatgttaacccttgctgtgccacgatttcaccaatggcaaagatgctgtttggatatgattgattaaattgtttaaaatttgcttttgtcatggtcaagcacaactgataatcatcgcccccattgatttgatgttgccatttttgggcatggggcaaggcatcaagcaaggcatcactgggtatggcatcaaggtcaatcaccgcaccgacatttgaagcggttaagatatgccccaaatcctgccccaaaccgtccgagatgtctatcatgctatttgcaaagccgatgagctgcctgccaagtgccacttgtggggcggggtattgcatggcttggcgtaatttttcaggcaagctctttggcggtcggttggcgtgtccgtctccatgtaaatcgtccaaaatcccatgcaaagcaaggcttgccagccccaccgtaccactgacacacaccacatcgcccacgcatgccccttggcgtgtgattgcctgcccatgtggcacaaatccaagtgccgttactgaaatcgttaaaatgggtgagcttgtggtgtctcccccaatcagctctatcccaaacggtgtgcaagcagccgccaaaccccctgcaaatgcctgacaaaagtcgtcatttgccatggactttggtaaggataagcccaccaaaatggcataaggcgtcgctcccatgctggcaaggtcggacagattgaccgccaccgatttataagcgatggcgtgggggctggtctcatggacaaaatgccgtcctgccaccagcgtatccacacagctgaccagctgactgtttgagggaatgttgctgatggcacagtcatcaccaatgcccaacacggtatgttggtggggggcggttaggtgcttaaaatgggtatggattagggaaaattcggacatggtgggtgatgggttgatggacaaaacttagcggataaaaagagcaatccgtgtttttatttatcagcttgcacctctggctgacgcacatttttggcaatcttatccatgacggcattgataagcttatgagcatcggttgccccaaaatggacattgagcttcattgcttcatctaacaccactttgtaggggatatgcaggctatgtttaagctcataagtgccaatgagtaaaatggcgtgttcgataatgtcaagtttggataactctctgtcaagttggctgacaatcagggattctaattcatcaatttgggcagggatattacgcatcagttcatgataatagcccaaatgtacggtgtgcatggcattatcggcacgagttcgggcggcgatggtatgtggctcattaccccctaacaaatctcgtctttgtttggcaaagcggtaatcagtcatcagccattcatacagaccctgcacagcaaaacggcgagccttgcgtacggcggtatggctggttttatagccagtttcgttgatgtcaaattggtcattttgggggttggggatggtcatattcggccttaaaataatactgcattaaaatcatcttttaatggggaaatcaaaaaccagacagcgatgctatttttatgatgaaatctgggtaaatactttgggttaaagtgcctttaagacactgaccatttcaatggcagtcatggcggcctcataacccttattgcctgcttttgtgccagctcgttcaatggtttgttcaatgttttcggtggtcaaaatgccattaatgacaggaatgtcatgatgcaaagccacatggcttaaacctttggcggactcacttgccacgatatcaaaatgcggtgtcgccccacggataatcgccccaagcacgacaatggcgtcataattgcccgtgaccgccatgcgtttggtggtcaagggcaactcaaatgcccccggtacacgcacaaccgtgatgttctcacccagcacgccatgacgcagcagagcatccaaagccccctctaccaaactttcaaccaaaaagccattaaagcgaccaacggcaatcccaatacgcaaattggcattttcatgtaacgcaccatcaatatgggttacggcatttttttgttcggtataagttgtcataatctactctcaaaagatgtgtcttttaattatcctaaccattttatcataatttaccgacagttacccataatttgtttaagatagtttgtttgattggtatgatgcgataaaattaacattaatcaataaaagcttaggtaaatgactgtagaccaatgggctaaattgggcgaatggtaatgccttggtttgccataaattctttggcttgtttaatggtataatcaccaaagtgaaaaatgctggcagccaataccgcatcagccttacctgttaagataccatctgccagatgctgtaaattgcccacaccacctgaggcgatgacagggatattcaccaaatcactgatggtgcgtgttaataataaatcgtagccttggcgtgtgccatcaccgtccatgctggttaccaaaagctcgcctgcaccccgcttggccatctctaccgcccattgcaccgcatcaatgcctgtggccttgcgtccgccatgggtaaaaatctcccaacggggctgtccatcgatgtcgcctactcgtttggcatcaattgatacaacgatgcactgattaccaaaacggctggcagcatcattgacgaaatcaggattggtgatggcagcagaattgatgccaactttatccgcacctgcatttaataaattgcgaatgtcttcaagcttgcgtacaccgccaccgaccgtcagcggaataaaaatggtacgagcaattttctcaaccatctcataggtagtatctcgcccatctacgcttgcggtaatatccaaaaaggtaatttcatcagcaccttggtcattgtagcgtttggcaacctcaacagggtcgcctgcgtctttaatgtcgataaaattgacacctttaacaacacggccattttcgatatccaagcaaggaattaggcgtttggctaacatgattttccttaaacaatcaataaacaaaggtaaaaacggtcaaatgcttcagtaaagccataagcttaaccgataaaagcataaaaagtacagtttatgccaagcattatagcaagttctaccatcgttttgcacatcaattgaatattatgcatcattcaagatgggttggcagtgtttcatccgatcatattttataaaaaatgtgaccaagggcaggcatgctttggtaaaatatgaaaaattttatcgcaattgccttaaaatctattacaatatagttttattttatgttggggttgcccatgtctgtttatactcacttatctgatgatgaattttttgccttttgtgggttgtttggggtagcatttaaaaaagccgcccccatcacccaaggcatcaaaaattctaactggttcatccaaactgacagtgatgaagatggtgagtttagccatgtttttactttatatgaagagcgtgtacctgatgatatcattaaaatggcaaccatcatgcacacactcaaagacaggctaccgattgctgcaccgcttatcaagatgaccgccaagggcaatcatattggtgaggactgtgtgatgcgttatgaaaataaagccatcttaatcgtcccaaagttatcaggcagtcatcctgtgctgacagatgttgccatgtgccatgaaatgggtaaagctttggcgactttgcatgacgctttaacaaccttgcagccaagtgaagattatggcgtaccactgtatgactggacaagggtcaaagagcgtgaaaccgcctatatgcctaccgatgaggctcgtctcatgaacgatatctggacagcctatgccaatttacctgatgacttgcccaaaggcttgtgccatttggacatgtttgcagataatacgctgtgggattttacgggcgatacaccaaagctgacaggactgcttgattttaccgaggtatctgttgagcattatctgatggacattgccatcaccatcaacgatttttgtaccacatggggcaatgccaatgacggcgagagcgtgaattttaacacgaacaaaatgactgcttttatagacggctatgcgagtgtccgccccttaacggacaacgaaaaaaccgccttgcctgtgatgcttgcctatagtgccaccattttttggcttttgcgactaaatgtcattcaccataaccgtgaacaaggacgcacaggcgataacatcatggtcaaaaatcccgacttgatgaaacgcttggcaagtcatcattgggcaaaggtgaaataatcatgtgtcaactgcttggaatgaatgccaatacacccactgacattggatttagctttacagggtttagaaagcgtggcggacttaccgactatcatgaagatggctttggcattgtcttttttgagcggacagcattgggtgatattgggcttcgtcagtttcatgatgataaacccagccatttatcgcctgtggctgatttggtgaatcattatcccattgaagcgatgaatgtgattgcccatattcgcaaggcaaccacagggggtcatggactggccaatattcatccttttgtgcgagaagtttggggagaacaatgggcatttgcccataatgggcagatgagcgatggctttattcgtcgcacccaaaggctgatgactaatggtaatgcagaacattatgcacctgttggcaccacagacagtgagcttgcgttttgttatctcttaaaccgcctaaaagcaacctttaaaacacgcccaactgatgagatgttgtttgcttttttgacggcacagtgccgatatttggcggcaaatgggctgtttaattgcttaatttcaaatggcaattggcaattggcgtatgcaggcagtttgttattttatttgacacgcaaagcgccctttggtgaggcgacgctgtctgatggcgagatgacggtgaattttagtgatgtaactactgataaagataaggtcacgattttggtaaccattccgttgactgacaatgagcaatggcagcaattagcggtggatgaatgtatcgtttttcacgatggtgagatggtgttcaaagacaccccaagcaaaaaaacttatctaagcattgaagaaggcataaagctggcatgcagtgtgggagctagcgtatgaaagatatcaaaggcatcgctcaagctgagctggacttttggccaagttttcagcaaatcaaccaagccatgcctcatctgatgccctatgctgatattcatcgagcctttggtgaaacctatcaaggggggcatttgtcagtatggataaatgattattttcaattatctaatatttatccctgtctacaggtggcaaatacaccgcttcaattcaccgctcaagatgatttgccacatggcacagcatacgaaatgtacattcatcaaaccgccaaaattcccacgcgtgacaatctgcatgattggtttggggcgtgcgtttggtcagtatttccaaaaaccaaatccatgctaaatgccaagcatattgcgcattttgctcatcaaaacacaagcaatggtcgaaatcgtgtgcgtgataccattacagtttttgatgaaaatggggcaatttttgtggtcagcgaagacgccattggcactcagattggtgatgccttggtggcatttgattggcaaaattgtttggtgaatacacgccaatattggtaccatctgttacagccagatacgcacgccaaagtatttgtctttgggcatgcgctgcttgagcaactgatttcaccttataaatccttatgtgcccacacgcttatcgtgcatgtacccaaagcgttttttgagctatcgcagcctgagcaattaaagcgtatcgacgagatattatgcaatcaattaaatgattttttggtggagggtgtgacaccaaagcatttgcatccattgccaattttaggtgtaccacatttttgggataatgccgatccaagcttttatcaagatgcgtttgtttttcgtgcaggtcggcaaaagcaggcaaaaaccacataggttttatcatcattgattaatccgtcttattaggctaaagtgcgaaatgacagcttaaccagctgctcatcaaggtactgcttgccattttatgtgccaaaacgacccaatgctcggataaaatcggctgatgatggtgcaacataaattaaaaccaaaataatgacatataaaaaaatataaccaaacggtttttttatctcaaaaaatttaaaggcagtaccagctgattttttgagccttaagccataaatattgacgccataaatttcatccaagatcaaatgaatcagcgcacccatgaataaggcagcaccaaatagccagctgacaaatgccgtcaattttagtccataaaacgccccacataccaatagtagcccaaacattgccatataaggcacagaatgcaccataccacgatgggctgttaggcgactaaaagtgccaaataagccaagcctgagtaataaaaacgcacccatccacaaaatcaaagagtcaatcaaaagcctgtcagcatgatagcggttggcgtataaaatggtgattagtgtcgagacgaccaatgaggcgattaaaaagccttgagaagcaggctttgagtggtcaagatcaatatcaggcaacaggctgcctaatgtcccaacagccaaacaaagcaccgctgtcgttaagccatataattcaaaataaaaaccaaaagcggcgatgatggtactgccaataacaccagcggtgagatgtgtatgaaaatttgccataatttaatttaaactgtgctttaaccaaaactttaaagcaaaaataaatcaacaaaaaagccagtcatgtgatcagactggctatttgcttctttgtaagaaaaatattggcatcccataggggattcgaacccctgttaccgccgtgaaagggcggtgtcctaggcctctagacgaatgggacgcaagtaaaagtacttagacttttaaataaagcagtcactatttttaaattaaaaaaatgagtaactgccaaaaatgtaagaaattgcctaggtgcttacatttttgtacgagattagttatggtggagctaagcggagtcgaaccgctgaccccttgcatgccatgcaagtgctctaccaactgagctatagccccatactaagctaatgacagcgtattatacagaataaatttgagccgtcaagcattttttgcattttttgagcattttttcaaaaatacaggcaaaatacaggttttgagtactggggcataaggctttggtatttaggctaaaaaatttggcagagatttatttttctcttctaattttttgagctttttcttgcccaatccaccgagtatctcacaagcgtgccgtaagcgtgccaaagtcatgtctgcaccgatgatgtacatggaattcatcacaggtgtgcttgaggtcgagcctgcaatcgccacaaaaaatggctgcataaaatcttttaatttaatgtcaaaatgtgccgccaagcctttaagggtttggtaaatattctcttcgctccaaatgggcaagttttctaattgccaagtcgccaaatataaaatttctaatatttgctcattatctaggcttttgtgggcaaaatcttcggcagtgatggcgggcagattttgaaaataaaaacctgcccagttgattgcatcggataataaattaatgcgtggctgaatggcacgagcgatggcggtgagtttagtgtcatcgcttgcccatgccaagattttattttttaggtcatcaacggataatgtccgcagatattcaccgttgagccagtatagcttttcgatatcaaagacagggccacccaaggaaatacgctggatatcgaagctttgaatcatctcatctagggtgaatttttcttgttcatttggcaactgtaacccatgcgacccagataatttatcaatgcctcagggagtatgcctgcatctcgatagtaggtaatggaggttggatttttacgcttagacagcttggatttatcggggtttctaagtagtggcatatgacaaagctctggcatttgccagccaaaatattcatataacagctgatgcttgggtgctgagggcaaccattcttcaccacgcaaaacatgggtgatttgcatcaaatggtcatcaaccacattggcaagatggtaagtcggcagaccgtcagtttttagcaaaacctgcatatctacctgttcccaaggaatgacaacctcaccacgcagcatatctttgatggtacaaacgccgcttgatggtacacgcatacgaatcacaaatggtttgccttgggcgaccaacgcatctgattcttctcgtgataaattggcatagcgaccatcgtatttaacgggcaaacctgctgccatctgtgcttctcgcatggcatcaagttcttcgggtgtgcaaaaacagcgaaatgcatgtccatcatctaacagctgctcggcgtattttttataaatatcggcacgttcagattgacgataaggcgcatgcgggccgcccacatccggaccttctgcccaagataatccagcccattttagtgcatctagaatcatttgttcagattgcttagtagaacggacttggtcggtatcttcgatgcgtaaaataaattcaccacccatggatttggcgaatactaagttaaacagtgcaatataagcggtgcctacatgaggaaagccagttgggcttggtgcgattcgggtgcgtacaggtcgtgtcatgattttctctaacttaggaaaacgaattgtttgtgctatgataacaaatcgccacagtttttggtagagacagtcacacgctttataaaatgatgaaaaatattgaaaaatgtacaaacaatacaataacgtacacaaaaaattttgataaacttcccacaactctttgatttattgataaaatagtaaggttatgttcccatctgatgatattttattcggcgaatagatatctaagcaactggcatagcattcatcatttttgctaaataaccacagtgagcaccatgtcaaacaccatttccacctctgatgaatttagtcatacgacggttttgttaccagaaacagttgcgatggtgcttggtgtcaaacaattaaacgatgtcacttcaaaagtttcaggtgtgtatgtggatgccacttttgggcgtggtggacatagccagcttttgcttgaatatttggcacctgaggcaactttggcggtctttgataaagacccagaagccatcgctgtcgccaaaagtctggcagcacaagatacacgcattaaggttgtgcatgacagctttgctcacttaacaaaaaatttacaggcattgggtattgataaaattgatggtttgatggcggatttgggtgtctcaagcccccagttagacgatggaactcgtggctttagtttcatgcgtgatggcgtagttgatatgcgtatggataccacacgaggtgagcctgtctctgagtggttacagcgtgtatcggcggatgagctggctgatgtgttgtatgaatatggcgaagaacgccattctcgcaagattgcccgagcgattaagtccatgcaaaattacacttccacacgacaattagccgaagtcatcaagcaagcccatcctgcatggcaaaaaggcaaacatcctgccactcaaagctttcaagcaatgcgtatttttattaataatgagcttggagatgtggaggcatttttggcacaaagtatcggggtgctaaaagcaggtggtatgcttgcggtgattagttttcattcgcttgaagatcgtttgattaagcagtttttgcagcgtcacagtcgtggacagtatgaagaagatgcacgcctgccgatcatccctaagcgtccaaaatattttggtaaaccaaagcgtattgggccttgtgatcaggaagttaaagccaatcccagagctcgcagtgcgtggctgcgtggtgctgtgcgtagtgatgtcgctttggtggcacaagacgaagattgatatattttatttgataggtggcgattttcatgagcaacactcctttgatgacaacactcaactcaagcatgacttgggttttgcgtttggtgttggcggttttggttgtgatgatttttgcaaccgctttgggcatcgtcacccaaacccaagagcgacacgaagcctatattgaattacaaaaacgcagtcgtgaattaaatgagctaaaaattgaagagcaaaggttgatgattgagcagcaaacattcagtgccacgccgcaagttgctcagcgtgccgtcagtgagcttggaatgttttttccgaccaatgaaaaccgccgtgtcattacgccgagtgctaagcctgactctgagccaagccaaaatagcgagtaaagcatgaccaaacaaagaaaaaatccaaaaactggctcagcgacgacagcagcgtctttacaccgtccaaaggcgtctgccaagacttttgggattttaaccaaaaaacgcatcaaaaaatctggcgctaatttggctggtggcaagcaagatgcttggcgatatttgatcattggggggttgatgctgtgtatatttatggcgatttttgcacgcgcattttatctacagatcgtcaatccgcagttttttattgataaaggtgatgagctgattacgggcaaacgcattgaacctgcgtatcgaggtgtcatcacagatcgtgaaggtgcacctttggctgccaatgcaccattatatacggtattttttgatccttatgcctatgccgaagaatattatcgcttagacaatgaaataaaaaccaccaaaagtgaaaccgccaaacaaaaagcactcaaaaaactcaaagaaatggacttggttaggttggcagcggcggcaaattatccgcttgaaaaacttgaagcggccgttgggattgatcatacacttgacacctctaatagccaaaaagtcaaagaagctttaccaaaaggtgcaagctcacgccgtttggtgctattaaaccgtgtatcacctgaagttgccaaatccgtcacagatttggggttatttgccattggtcgtgagcagtattttcaacgctactatttacaagctgaacccaatgcacagcttttgggttatatggctcagtcaagtgacgagactcaaggcggctatattgggcgtgcaggcattgaggctaaatataatgagcgtttggcgggcaaagatggcaaggtacagattttgcgtggtactggtcggcagcccattcaagagattgagcaaattgaaccgcttattgaaggcgaaaacattcgcttaacaattgactcacgattgcagtatgtgctttataaagagcttgagcaggttgggcgtttgcagtcggcgcgttcaagctcaggcatggtggttgatgttaagacgggcgaagtgttggcgatggggtcatggccatcttttaattctaataatttgtccgaacgagatggtgctaacgaaagaaaccgccccgtgcttgatgtgtttgagccaggttcggtgatgaaaccgttcacagtggctgccgcacttgaatcgggtgaatacaccaccaattctgtcatcgataccagtccaggcagcgtgtcagtgggtggatatacgatccgtgacggcggtaattatggcgccatcacgctagataaactgatccaaaaatccagtaatgttgcctcaacaaaaattgcgttaaatttaccgactgatgctatcgctaatatgcagcttaaatttggttttggtagtaagacggcactggatttccctgctgaggcatcgggacgagttagtattccaaaagagcgtgagctggcacgccgtgcaacactaagttatggctatggtcagcaagtgacattggcacagttggcccaagcttatgcagcacttggcaatcgggggctgatgcagccattaaaacttgttaaagatcaaaaaacgcccgaacctacccaagtcattcatgcaggtcatgccgaagccattgtgcgtatgatggagcttgtgacaggaccaggtggcacaggtcaagccgctgccatcaatggctaccgtgtggcgggtaaaacaggtaccagtcggcgtaccaatccacaaggtggttattataccgatcagcatcgtgtgatttttgtgggcttggcacctgcatcagatccacgctttgtggtggtaatcttggttgaagacccacgccgccaatcgtatgcagggcaagtatcagcaccagtattccaccaagtgatgaaagaggcactacgcttatataatgtgccttatgataagcctttacgggtgttatcaccctaaactaaccgatgaatttagctgattaaggatgtatgatgacgccaataagttttcgtgaagtgatccaaaaggcggtggctaccccccacactgtggcggcaaaacttggtttgatggcacttgagtctgtgttttcgccgattttggcgtgtcaatttgaccaattttgcttggatagtcgtaagattggcgtagatgatggttttgtacttttaaaaagtagtagtcaagatgctcaaacaaacctaaataatgccaatcgttatcttatgtcggtcaaagacagtgcggcatttgtcatcagtgagtttgatttggcggggctggatttagatgacatacaaattcctatcattagcgtgccaaatattcgcacctatttgggtgatttgattgctgctcgccttcagctacatcatgccgtggcattgcccaagattattgcggtaacaggtacgaatggcaaaaccacggtcagtcagctgatcgcacagctttgtcaagcgtctggcatcagctctgctgtgatggggacggcaggtaatgggcgactgggtcaactgatgcagtccgccaacaccacaggcgatgtgctattgacacatacatttatccatcaaatggcacaagaaggcgtacaaatgattgcacttgaggcaagctcacatgggcttgatcagtatcgcttacaaggcataccaattatcggtgctatctataccaatttatcccgagatcatttggattatcatgctgatatggcgtcttatcgtgatgccaaagccaagctttttgatcaatcattgttcccaacactaagatttggtgtggtgaatttagatgatgagcctgctttgtttgattatgagactgcagattttcagataattggatatagccaacaaaagccaaacgctgatttttatgccaaagcagtacgcctaagccttgattgtgttgagattgaggtacaaacaccccaaggtgagatgacggcgataagtcctttgcttgggttgtttaatgtggataatttgcttgccagtatggcggcatttacggctttaaaccctgcaagggcagcagatttgccaaatttgattactcaattacaaggtgcaagagggcgtatgcagcgtgcgtcatctcagacgggtgcttttattattgattatgcacacacgcccgacgcacttaagcaggtcttatcaagcctgcgtcgccactgtacaggccggctaattgccgtctttgggtgcggtggtgatcgtgatcgaggtaaacgcccgcagatgacccaagcaggtttggcgtatgcagatcaagtgattttgactgctgataatccgcgttctgaatcgccatctgccatcttagcagatatgcaaaaagggctgtcttgtgaggatcattataaaatcatcatcgagcctgatcgaaaaaatgccatcgaattggcggttaaaaccgcaggcaaaactgatatcgttgtgattgcaggtaaggggcatgaaacttatcaagaaatccaaggcgtgcgttatgattttgatgatttggcagtattgggtgagtttttacaaaaatatcaaaaataaaaagtaataaaaggcaatcgcatgacaaattcaagtgcatatttttggaaccaagataacctaaaacaagccacacaggggcagtggcatcacagtgataaggctgagattgacgcccgtcgtattgtgactgatacacgccaaatccaagcaggcgatgtttttttggcaatcaaaggtgagcgatttgatgcgcatgattttatccaaaatgcgtatcagcaaggtgcatctgcggcgattgttgagcgtgttgttgattgcgatatgccacagcttttggtggcagatactaagcttgctttggggaatttgggtaagtttcggcgagacgctcaccctgatttgacggtcattgccttgactggttctagtggcaagacgacgaccaaagagatgattggtgctattttaagtcaaattgcaccgacgctcatcacgcgtggcaatttaaataatgatcttggcgtgccgatgatgttgcttgagctgactgatgagcatcgttttttggtgatagagcttggggcaaatcatttgggtgagattgcttatacagcgtcaatggtgcgtcctgatgtggcgttgatactaaatatcggtacagcgcatttgggtgagtttggtggtcgggctaatattgcgtgtgccaaatcagagatttattcggcactgaccagtcagggcgtggcaattttaccattttcagatgacttttatccagagcttttaaagcaagcgtctcaatttacaaagctgcatttatcgtttggtgagcgtgccgtgccgattgagcaagcggggcttgaagcgacggatcaagctatgcttaaagccgaaggtatcagctcggtgctgatgatgggggatttatttgctgatgatatcgaaacttttgctacgcacagcacatttactctaaataccaatattgatattgatcaaattgacagcttgcctgttcatctaccgttcattggtgagcataatgtggcgaatgcgttggcggcagcttcggcgacttttgcactgggcgtaccacttgaacaaatcgccaaagggcttctgcgtgcgacgccacctaagggtcgtttgatgcgtctgtcaatggatggatatcacattattgatgatacttataatgccaacccaacttccatgctcgctgcagcaaaagtgcttgaagctgaattagacactaagatattggtgcttggtgatatctttgagttaggagatgcggcagatgatgagcataccaaactggggcatcagttggctttacttgagattgatcatgtatttactttgggcaatcacatggcacacactgccgctgcaatcaatgaacaaaaacccattgccagacattatacagataagccaagtcttttaaaggatttgtgtcagttattgtcacatggttctgccaccgtgttatttaaaggatctcgtggcatggcaatggagagcctgattgctgatttgaccgcttgtaaccattaacaaattaaggatgcttcatgttgtattggctattacagcaaacagacattgccatcggttcattgactttgcgggcactgcttgcggtgattacatcgctgcttattgttatcattggtggtaagcctgtgattcattatctgcgtaccttaaaatacggtcaagccgtgcgtgatgatggaccaaaaactcaccttgccaaacaaggcacgcctacgatgggcggggtgctgattttggtggcgattggtattgctaccttggcatgggcggatttaggcaatccttatgtttggattttaatggtggtcatggtcatttttggtgcagttggctgggcagatgattggctaaaaatcaagcacaaaaacccccaaggactgattgctcgcaaaaaatatttttggctatcggtcggctcgctatttgctggctgttcgatgtattacatcgccacacagcaagataccactgccatgatcgccatgcaagacatgctaatcccactgtttaaagacattgtgattccgttttcagcgattccattgggtttgggatttattattgcgacttattttgtgttggcaggctcatctaatgcggtgaatctgacagatggtttggatggattggtgattttacccgtagttttggtcgcagcaggcttgggcgtttttgcttatatttctggctcgccacattttgctgattatatgcatgtgccttatattgcttataatgctgaggttaccatcgtctgtgctgccatgattggcgcaggcttgggctttctttggtataatgcagcacccgccgatgtatttatgggcgatgtgggtgcattgagtcttgggggtatgcttggtaccattgctgtgatgactcgccaagagttggcgtttgcgatcatgggcggtatctttgtggctgaagcggtatcggtgattttacaggttggttcttatcgtctgcgtaaacaacgcatttttttgatggcacctttacatcatcattttgaagagcttggactcaaagaaaccaaagtagtcgcgcgtttttatattgtgtgtattattttggtggtgcttggactgatgaccttaaaattacgctaaatttgccaccaattcaccgatgagccttgtgtccttttggtaagtgcgttaaggtgagtttaacggccgattggttgataaaattttaataactcttagggagattgaccatggtgggctataatagcgagatcgttagagtgtatatgcttatggactgtctggactttcaagctttatcgggattacgactatgaatgttcaaagatgcgtcataatcaattggatatttagctcaagatccaaatctatgtgacatgagctggcacagggcttgagtggtatagcctgtgatgcggtcagggttggctgtacaccaagttttacccatgtatcgactgtggcaggtgtattggcaggtacaccgatttgggtgggtgctcaagatatttgtgcatatacccaaagtacaggggcgtatacgggtgatgtgtctgctgagcagctgagtgatttgggcgtaggctttgtcattattgggcattctgagcgtcgcaactattatcgtgaagatcacagcttattggttgagaaaatgaagcacgcatttgctgcagatttgagcgttgtgtcttgtattggtgagaccaaagagcaatatcaagacaatcagaccttatcagtacttgatgatcatttatcggtattacaaacctttcgtgtgccacggggcaagcttatcattgtttatgaacctatctgggcgattgtgcacatgtctgacacccagcactcaagaagtcatcgcaacccatgcgcatattaagtcagtcttagcatcgtatcactttgaaggcgtcagtgtgctttatggtggctcggtgaatgagcaaaatgctgctgaatttgctcaagctgaaggtgttgatggggcattggtcggaggtgcttctttaaaattggatacctttgcacagattattgctgcatttgagtcagcatcgtagcttattttatttttgtataccatacgattgggaaatttatgcttacaattcttttagccattcatattattattgccattgtcatggtgggttttattttgattcaacatggtaaaggtgccgatgcaggcgcatcttttggctcaggtgcagcaggtacagtttttggtgcggcagggtcggcaaactttctaacacgcacaaccgcagtgcttgcgacaatcttttttgcaacaagccttgcactggctcacttcgcccaaaaacaagccgaagatcagttacgcttggatgtgccagccgttgtcagcgagacaccgaataccccgccaattaagtaatgattttgcttgcacttgacagattttttgggtagaatactccgatattttgcgatcgtggtggaattggtagacacgctatcttgagggggtagtgcttcacggcgtgagggttcaagtccctccgatcgcaccaaattcaatttctggcttatctttagggattttttgcttgaattaggcatcaatcactgccgatagatatgaatcactcatagacttgactggcagccagattgcttagctaaaaatttttaaaaattgcttgacattaaaaaaatagtctatataataggcattctaaattgatgcggggtggagcagtctggtagctcgtcgggctcataacccgaaggtcgttggttcaaatccagcccccgctaccatttttaaaatcctaagcgttgccaaattacaatcttaggtagcttaatatcttgaattaagctgtcggctggtattatgattgcccaccaaccttgtgttatgtgggtttttttatatctaaaacaaattcatcactgaaataacgcttatcactcatgatgggttatacgatgttataatagtgctttatagactgttgtgataagtaccgccgttttgtaaatattattttaggaattatcattcaatcatgaaaccatcaagcaaaattgctgagctgaccgaattgattgcccctgcggtagctgcctgcggtgttgatttgtggggcattgagtttatgccccaaggtcgcaaatcattactgcgtatttatattgaatcactgcccgaaaatcgagcggcaggcgagcatgtgaccattgaggattgttcagcggttaatcatcaggtttctggtgtattagatgttcacgatccaattgcgggcgaatatgtcctagaggtgtcaagtccgggttttgatcgtcctttatttacgcgtgagcaggtagcggcatatgtgggtgagacgatcaatttgcgattaatccatgccattggtagcggtgatacgaaacgccgcaaagtagtgggtcgcttgacctgcgtgggcgaggatagcatgacagtgatcaccgaagataagcttgaatttaatattgcatttgatagcgtggataaagcacatttggtgtacgaagactgatttatttggtctaatgcctgtcatatgagattgcatggtgaagtgatacaatcattgcataaaaattaatcaatatcaattaacccaaaggatctacagatgagtcgtgaaattttgactgtggttgagaccgtcagtaacgaaaaaggactaaatcctgaagatatttttgaggcgattgagcaagcgcttgtcgtctcaaccaagaaaaaagtctatactgagcagcctgaagttgccatccgtgtacatattgatcgcaaaacgggcaattatgatacatttcgttattggacagtggttgctgatgaagatcatgagatgccagcgtgtcagcttgcgatcagtgatttggacgaaaacgaatggcagattggtgatgtcaaagaagaacaaattgagtcgattgaatttggtcgtatcgctgccacgcaagccaaacaagtaatcattcaaaaaatccgtgaagctgaaagagcgttggttgccgatgcgtttgagtcacgcattggtgatttaatcagtggtgaaattaaaaaacaaagccgtgatgcttatattgtggatttgggtgaaggcggtgaaggttatttggcaaaagatcagacattgccgcgtgagacattgcgtgtcaaaagccgagtttctgccatcttatctcaggtcaatcgtgatggtcgtagcccacagctgatgttgtcacggaccagcaatgagatgctgattgctttgatgaataaagaagtgccagagattagtgagcagattattgagattcgtgatgtggctcgcttacctggtttacgcgctaaaatttcggtaaaaaccaatgatcaccgtattgatcctgtgggtgcgtgtattggtatgcgtggtacgcgtattcaagctgtacaacaggagctagatggtgaacgcattgatgtgattgtttggaatgaagatccagcacaatatatcatcagtgcgcttgagcctgctgatgtcattggtcttgtgcttgatgaagatgctaaaactgctgaagtgatttttgcaacgaatgatcaattagcccgtgccattggatctcaaggtcaaaatgttcgcttggcttctgaattaactggctacaagctgaacatgattttggagtctgaatacagcgagcgccaagcttctgaaaatcaagcagtgattgacctattttatgaacgcttggagcttgatcgtgatttggctgaagtgttggcggaagtgggttttgccgatattgaaactgtggcgtatgcaccagtagaggaattctatgaaattgatggcttagatgatgaaaccattactgccatccaagagcgtgccaaagaagtcatcatcagtgatgaaattgccaagcagcaaaatatcaaagagccaagtgccgagcttttggctttagaagacatgacgccagcaatcgcttacaaattggccgagcgtgatatcattacgctggatgatttggcagagcaagccatttttgatatcgaagatatcgagggcttgaacagccaaagtgctggaaaattcattatggcggcacgccaatcatggttcgaataatcatgagtgtagcggtcgtaggcgtacagcaatgagcgtacagccattaaaataactttgccaagcctaaaggtttggcagacaatacataagtgggcagtgtttggcagttgtgccaagcccacttgccaaaccaaaacaattaggtgatatgaatggcaaaaacagttaaacaacttgcacaaacttcaaaaacaacaaccgaaaccatcctaaaacaacttgccgatgctggtctaccaagtcgtggcgaaaatgatcttgttaccgatagcgagcaagataaactggtggcttttttaaagcaaagccatggtgaaaaacccaaatctcgcatcagtttaaaatccaaaactacctcaaccgctcaagtgacaggcacatcaggtaaggcaaaaacggtcaatgtcgtgcgtaccaaaaaagtcgtctatgacaaaccagatccagctaagattgaagcgaaaatcgcagcccaagctaaggctgccaaagaagcacgcctaaaagctgccgaagaaaaacaagctgccgaacgcagtaaaaaagaagcagctgagcgtcaagcggcaaccttggctgcgatgcgtgcaagcagtgagcctgtaaaaaatcatgaggttaatgcgacggttgtcgtcaaaaagataaaaaatccagaagacgccaagcctgctgataaagcagaaaaaaccgataagaaaaaacctgccaaacccatcaaaaaagaatcggcaactgacaaaaaagcgcgtgaagctcgtgaagcagaagaagagcgtttgcgtcagatggaggcagaaacacgccgtaaagctgccgaagaagctcaaaaacgcacacttgagcagatgaaacaaatggcgtctcgctatagcgatgctgatgacggtgcgactgccgctattgttcgtaccaaagacgatgcaccgttggctgatggcttggtgggtgctgcgcttgaagaatcatttgaaaaagagcgtcgtgaaattaaacgaggtgcaacaggcactgctggcaaaggcggtaaaaaaagccgcaaaggtcagcaagaagagcgtgaaatgaaaacccgtgcaaagggcttaaaatcatctcaagccaataaacataaatttgaaatgcctgttgaaaaaatcgtccataatgttgaggttggtgaaaatatcgttttatccgatttggcacaaaaaatggcggttaaggtgcgtgaagtcatcaaatcactgatgaagatgggtgagatggtgcgtgagtcagacagtatcgatcaaatgaccgctgcacttgtcatcgaagaatttggccataactttgtaccgatcagcgatacccagctagaagatgatttacaagtcgctgttgatgaaaaatcaggtaatgtccaaacacgcccacctgtagtaaccatcatgggtcatgttgaccatggtaagacatcgcttttggataaaatccgcactactaaagttgcaagcggcgaagcaggcggtattactcagcatatcggtgcatatcatgtaacaacagatcgtggtctaattacctttttagataccccaggccatgctgcttttaccgccatgcgttctcgaggggctcaagcaacagatatcgtggtgcttgtggttgctgctgatgacggcatgatgccacaaaccgaagaggccatcgatcatgctcgtgctgcagggacaccgctcattgttgcgattaacaagatggataaagataccgccgatccagatcgtgtgattaatgagttgtccgtcaaagaagtcattccagaagagtggggtggcgatactcctatggttaaagtctctgccaaatcgggtatgggtattgatgagcttttggaggttattagtatccaagcagaactgatggagcttgaggcaccgattgatggtgctgcccaaggtgtggtgattgaatcacgcttggataaaggacgaggtgctgtggcaagcttattggttaagcgaggtacattaaatcaaggtgatttggttttggcaggcgaatactatggtaaggttcgtgccatgactgatgaaaatggtcaacgcatcaaaaccgcaggcccatcaattcctgttgagattttgggtctaccagaagcacccgcagcaggcagtgaatttttagtggtatctgatgagaaaaaagcccgtgaagttgctgattttcgggcagcacgggagcgtgaacgcacgcttgatcgtcaaaataaaatgcgacttgataccttatttgaaagtatgggatcggcagaagttgcaactttgaatatcatcttaaaaacagatgtccgtggttcactagaagcgttattaaatgcattagacgaactttcaactgatgaagttaaagtgcgtgtgatcagctcaggcgttggtgcgattaccgaatctgatgtcatcttggcagaatcaagtgaagcggtattgcttggctttaatgtccgtgctgataatgcaggtaaacgcaaggcagatgaagcgggcatagatattcgttattatagcgttatctacggtcttattgatgatgtcaaagcagcaatgagtggcatgcttgcaccagagcatcgtgagcagattttaggtatcgctgaggttcgtgatgtcttccgctcaagtaaatttggcgcagccgcaggctgtatggttcaagaaggtactatttatcgcaataagccaatccgagtcttgcgtgatgacaaagtcatctttacaggccatttacaatctttgcgtcgctacaaagacgatgtcaatgaggtaaaagcaggtatggaatgcggtcttgcggtcaagggctatgaggttgccgtgggtgataagattgaggtctttgagatccatgaagtgaaacgagagctataattgtgatgatggcgtttgggtatattgtttaaaatcatgcaaatgatacgcccaaaagttagtatttagtcactccatttaattattaattttatttaataaattttaattgaatttttaataaattattggtctgatcgttcaaaaagattggtgttgatacaccaatcttttttaattgatatgatatgccgttgtatgagtgaaacaaacttttatctgataaacctaccaaatgaattatttggcataatctaggtcatcattttgaatcactaaattttcaccttcttgtatatccagcacttctttttgtagcttggtggtaaaaacatgctcacgctgaatggtttgggtgtttaggtgaatatcttcaatggcgtgagctgtttttgtgaccgtcgcagtctcacaatacaacaacatctcaattggtgtatctggtgttaatgaacgcacctgaccgttgatggtaattttggcgtgtgtggcttttgtgttgtcaataatattaaccaagtcatcatcatttgacaactgttcatgagttgccaaagaggcatcatcttgttgataggtgatgacaagatgttcttcagttaaggtgatgggaatattaacggtgcgtgtgtgtatctttttggataaaatcaccttacctgtattaacacgctgtttttgaacttcggccctttcttccaaaagctctaaggtttgagtatcatcaattgtatgcggtgttttcattgtcttatttccttaaaattttaggtctttaaaaatttctttgagatttggtttggattaatcaaacccagcttttcagtattgattaaatttaaaaaaagccagagcattgccctgactttttggatgtttgactgatgcgatttactcattcaagtcaaagtttgggttgggtcagattatagaccacgagcacggcgtacttcatcagcggtaatgccttcatagttgaccacattgccatttttatcaaccacattgcctaaatcatcaatattaagctcttcacgctgaatggtttctaaaatggtctctgtgcgagtttctgaagttttgcctaaggtgacctcttcggtgacataagtttgtttggtcacattggctcgctcagcttctagctcaacgctgatggtgtctgcacccgaatcattaatacggcgatctgtcgggcgatctacagcggtacgctcaatgtgggcatgctcttcttctaaatccacctcaacacggcgttcttcggtaaccacatgcttaccaaggctaacaatgcctgctacgatacggtctttattgactgttaagcgttcttctaacagctctagcgtatttggagcatgataatggctttcatctaactcaagacggctttctgcaggcagtgtctctgctgcataaaattcacggtctttattatattgttcttcataggtatagctataattttgatcatagccttccattgcttctacttgctctttggtcagactgtcaaaatatacctcatcgccaacaatgcgagacaagcctgctggaaccaaaacctcttttgagaagaaccaaccaccagcgtcaaccactaggtagcgaattttacctgtgtctacctcaaccaatacatcttgtactttaccaagtttttcttgaccgatgccataagcagttttgccgattgggttataatagtcatctcccaatacttcacggttggtagcttcaatgtcatacaatcgtactaacttactcaccatacttctccctttgttttgttgatctgattgatagatcaatcaggatttctaatctttttatataccgcttaaatttatataccgcttaaacttcagatacaaatttaaactatcgaggtaacctaatatcatcaaaacgataaaatgatttatcttttcttttatctgtttttatctgttggctacttcttgatgtctagcgatacttttagtataaagaatttaaaattttgtactaagcgttttttgtcaataattattatgattcaattaactatttataaaccaaagtaacccaatgtaactttaagtaaatttaataattttttgaaaattatgttgattatcggtaactatgggcaagctgattgatggaatttatcgttttatcatgccttttatgtaaaaatcggtgctacttttaacgagtatgttgaatgagtaagatgaccaaatgcaaaagcagacaataagatcaatcggcaaaaatgtcattcattggttttattaaaaaaatgggctatactaccaccatcatactgaggtgaattttaataacattttattaatcgtatatctatttagaggacttatgaatcaacgattacagcgacttgctgaccaaattcagcgtactttagccattttaattcgagatgagattaatgacccacgcttgacggggtttgtgaccatttctagtgtgaaggttagccctgatttgggctatgctgatgtttatgtgacgattttggagccaagtcaagatggtggcatgaatagtgaggcacatgctcaaagcttaaaagtacttaataccgctgctggatttttgcgaactgagctggcacgcaccatgaaaacacgcaccacgccacgcttaagatttcattacgatgaggtgaccgcccatggtaatcgcatgatgagcttggttggtcaagccatgcaaaaaacccaagaaagtgaaaaaaactatctggatgaagagcatcagttggatgatgataaatcatgatgaatcggccgaccaaaaaagtggtgatttcaggcattttattattagataaacctgctgatatcagctcacacagtgctttggcaaaagctaagtatttatatcaatccgagttgtatgattctaaaaaagcaggtcatacaggcacgcttgaccctatggcaacagggcttttaccgatatgttttggtgaggcaaccaaatttgcacagtatgggcttaatgcagataaaagttatgtcgcactgttaagcttaggcgtgaaaacagatactgctgatagatatggtcaggtgatacaacgcaccgatgcaccaagctttaatcagcaaacgcttgatgggattgccaacgctttaataggcaaacaaatgcaagtaccgcctatgtattccgccttaaaaaaagatggtaaaaaattgtatgaatatgcacgattaggcaaggtggtcgagcgtgatgccagacccattatcatacataatttgacactcacaaaactggataataccacaattaaattgattgtctcttgctcaaaggggacttatgtgcgtgtgctgggtgaaagtgtggcagagcatttggactgtgtggggcatttaacggatttgcgtcgcacggccacaagcggttttgatgtggcggatgcggtcggtcttgatgtgttaagccagttatcattgcctgataaaatcaatcggctattacctgtggatgctctgatgacgcatatacccattttaagcattgatggtttggaagctgagcgactaaaaatggggcaacgattaaatgtcaaagaccgtctagatagcttgcttgagtttgatgatgtgttgcttgtgcgactgtatgcccaagatatatttattgggctggcagaagtatccaacagtggacgattacagcccatcaaagtggtgcattgctattgacaaaattccttgtttaaaattccttgtttttgtgtgtagatgagattgagatattgatgcagcgtgttttcatctcgtcttgatttttatacatttcatctaaaaataacaaataatacttgcaaaaaacgcaggggagggggtaatatatggatgctttatgtagttttgtaaagtttttcttcaattctcaacttatctcaacttaaaatggcgatttaccgatgattcggtagttgctttttaggttgtggcgtggatgatgatttgccccgatgagttaattacctgtattaattacttgcatcaagttgagagtggggcagagtttggtggttttattttgtattttatttggtatttttaaggaacggttatgaaaaagctacttttggcagccctattgacaagcacttcaacactggcaatggctcaaatctccaccgatggtctgtatgtacaaggtaatgttggcgtatcaaaattaaatgccaaggaggacggtgagaaggctaaacgcaacgcaactcaatacaccatcgccgtcggtaaagacatgggtgcgatacgttttcaggcagactataccaactttggcaaaatgaaaaataacggttcagaaggcaagcgagacgaggtgaggtatgaagaatggaaagcttccttaaaagctcattcattgggcgtgtctgccatttatgattttaacaccgcaacagggctgaccccctatgcaggcatgcgtgttggtgccaatcagctaaaagttgacggtcaagatctttataataagattacaccagacggtaggctacaactagtaaaagatatcaaatcaaagaaaagcaacaaagtcagcgtgggtgcagttgcaggtgtgcaatacgcctttaatccacagctggcattagatgcaggtgtagaatatcactacttaggtaagattgagagtcttaaactcaatcaatatggtgcgaaagtgggtcttcgccataacttttaaaattagcaagctgctgattttaagcttgctaaaaaacccatcggtacgatatatcgatgggtttttgtaaaaagtgataaaaatcagcaaaacagctgacagcggtttaaaaaactgttataatttatttttaggtgccaaatggcgtaggtaagctttagcaatgcgatgcttgcctgaatttatttgcattgcttagtaaggaatgaatgatgttaacgaataaagatcgtgaagcggtaattgcaaaatatcagcgtggcgagaatgatactggtagcccagaggtgcaagtggctttattgaccgctcgcattaatgacttacaagaccatttcaaagcacacaaagccgaccaccacagtcgccgtggtcttatccgcatggttaaccaacgccgtaagctattggactacctaaaaggtaaagatttgaaccgctatactgacttaatcggttcattgggtctacgccgttaatttgtccttgtggcattgggtttttaacctgtatacgataccgaaaacggcgtgcttttgcgtgccgttttttattaattatttgtttattcattatttaaatcatcaatcgcattgagcatgaatttagaactctaaggcatgacatgaaacgatgttatgccttagggctttagattatgccaatcaatgcctattatataaaaggatcaatttatgtttaatcccattcgtcaagaatttcaatatggcaaccaacaagttgttttagaaacaggtcgcattgctcgccaagccaatagtgtgcttgtgcatatgggcggcgtttcagtcttggttgctgtggtcgtgcgtcctgaagccattgctggtcaaaacttttttcctttgacggtgaattatcaagaaaaaatgtacgcttcgggaaaaatcccaggcggttatggcaagcgtgaaggtcgtgcgtcagagtttgagacgctgacttctcgcttgattgatcgcccaatccgtccgctatttccagagggctactttaacgaaattcaggtaacagcaacagtcatttcatcagataaaacccaagatgctgacattgcagcgatgattggtgcatcagcagcgttagcaatttcaccagcaccatttaatggtcctatcggtgctgctcgtgttggttttatcaatggcgagtatgtactcaacccaactttggctgagatgaagcaaagtgatttggatttggtcgtggcaggcaccaaatcagcggtactgatggttgaatctgaagctaaagagctatcagaagaccaaatgctgggggcggtgctttatgggcatggtcagcagcaggtggtgattgataatatcaatacattcgcccaagcggtaggcaataccaagcaagaatttgtcgcccctgccatcaatgaagagctaaatactcagctaaaagagcagttcaccgctaaagttagtgaagcctacacgattaccgtcaaacaagaccgctacgcacgcttagatgagcttgccgcagaagctttggtactggcaggcgatgagacaagtgatgactatgccgataaagtcgcccaaattaaagagctatttgaaaccctaaaatatcgtaccgtgcgtgataatatcttatcaggcaagcctcgtattgatgggcgtgatttggagactgtgcgtgccttggatattcaagtgggcgtcttgccttatacacacggctcggcactgtttactcgtggcgaaactcaagcgttggttgtaaccactttgggtacaacacgggatgtgaaccttgtggatacgctggcaggcacaaagcaagatcactttatgctacactataatttcccacattattcagtgggtgagacaggtcgtgaaggtgcaccaaaacgccgtgaaattggacatggtcgcttggcacgccgtggtgttcaggcgatgttacctgccgctgaacgcttcccatacaccattcgtgtggtctctgaaatcaccgagtcaaatggttcatcatctatggcgtctgtctgcggtgcgtcgttatctttgatggatgcaggcgtgccgctaaaagcccctgttgcaggcatcgccatgggactggtcaaagaaggtgagcgttttgctgtgctgtcggacattttgggtgatgaagaccatttgggcgatatggactttaaagttgcaggttcggtaaatggtatcacagctctacaaatggacattaagattgaaggcattaccgccgatattatggaacaagccctaaaacaagcacacgcaggtcgtatccatatcctaaatgccatgaatgaggtcatcgcaacctctcgtactgagattaacgctcatgcaccaaattatgccaccatcactatcaaccctgaaaaaatccgtgatgtgattggtaagggtggggcgaccattcgtcagctgactgaggatacaggtgcaaccattgatattgatgataacggcacaattcgtatttttggtacagataaagcatcaacccgtgccgccattactcaaattgaggcgattactgccgaggttgaagtgggtacagtgtatgaaggtacggttgctcgcattgttgattttggggcgtttgttaccattttaccaggcacagatggtctggtacacatcagccaaatctctgatgagcgtgtggagaatgtgagcgattatctaaaagaaggtcaaactgtcaaggttcaagttcaagacattgataatcgtggtcgtattaaattaaccatgaaaggtgttgaataaacaaccttagtatcatattatcatatgactttaaaaaaccgctcttttgagcggttttttaataattttggttaaagatggtaagtgcttaagcttgagtaatctaaatcacttgaacaaccaatcattctacccaccacgatgataggggtgatgattaatcagactcatcgcacgatacaactgctctatgacaatgatacgcaccaacggatgcggcaaggtcagctccgataatgaccatttaaaatctgctgcttgcaatatctcaggcgaaacgccatcagcaccaccaatcaccaaggcaatatctgcaccatcttgcatcgccacactcagcttatcactcaaatgctcagtagacagcattttacccttaacttcaagcagccataatcgctcttttggatgtttggcatttaaaattgtcgtcgcttcgatggctttatatttatcaatctcggcaggtgagggggttttgctgcgtttggcaggaggtagttccaccatttcaacactaatcatgggctgaatgcgtttgaggtattcttcaaagccttgttgtacccaatttggcattttgtgcccaatacttaaaattcgtaatttcatcaaagcttcctatggttttgataccattttacttaaaatttgccaaaatttcatcgcaaaataacataactgatggcgaaaatgacaaaattttgttattctaagcaatttaccagcaaatttatcaagcagcttaagcaatagacttagaccataaaaatacaggagtaaacaatggtaacaaatacagcagtgtcgcacagtcctcagtacgatgattctgaatttgaatatgcaggattttggatacgatttgtggcatgtcttgtcgataatttaattgttatgattataattgcaccgtattggttttataattatcagcaaatgatggccatgcctgctgaccaaataccgttttatagtgttggggatgccatcctttatagtgctggggatgctatcctaaacttagtgatggcggcggcggttgtttggttttgggtaaaaaaaggtgcaacaccaggtaaaatgctctttgggctgcaagtccgtgatgccaaaacagggcaatttatcagtgtgccaagggcattattgcgatattttagttatctgatttcatccgtgattctttgtttgggacttatttgggttggttttgataagaaaaaacaaggctggcatgataaaattgccaaaactgttgtggtaaaacgcattcgctgatgggtcgccagttaaacaataaaaccatcaaacgcaagcagggcgatgtgtttgagcagttggcggtagataagctaaaacaagcaggctatgaaattattttaaccaactttaccaccccatttgttggtgagattgatattatcgccagacagcctttggagcaatcgcaccgtttggtgcagccaagattttgtacggtatttgttgaagtgcgtagccgaacaagttctgtgtatggtacagcgcttgagagtgttacctcaaaaaagcaggcaaaaatctaccgaacagcagaacgatttttaatcaattatcccaaatatattgatgatgcataccgttttgatgtcatggtttttgatttggttgatggattgattgaacatgaatggataaaaaatgcgttttgattggctcaatggtcgtgaattaaaatcaatcaagcaatccgtagctttactataagatatatcccagtaatatggaaacatagcatgatgaaaaaattattaatcgttttgacgagcatggcaatgattggtttgacagcatgtgtcagcaatggcacacaaagtgtcggcgctgatgcgatgggtcgcaccattcctgagcgtatcagtgatagtagtattgagcttaccgcacgccgtaatcttgcaaccattccgggtgtcagtccaaatacagtgcgtattgatattgccagttttcgccgagaagttttattgactggcgaagtacccagtgaacagattaagattgaagttgggcgtacgattgactcgatgagagatgtcgaaaaagtctttaattatttgactgtcgttgagacacccaaaagccaaagccatactttgcatgaaaattatttacgctcaaaaatcaatacccgcttactaaccaaccgccatcttaaatcatcacaatataaggttgttgttcgtgaccgtaccgcttatggtgctgggctatttgacatccgagcagcaaggttatatcttagaagccattcaagcgacacccggtatggaggctgcggtaactttgacgactttggtgagtgttcaggagttagaaagttataccaatcatgaagtgaatacacaggcgtataccaacgatgatggctatgatgccatggtggcaaagcctgatacgcaagaagatagtggctatatattgcaagaaatttatacacccaatgccagtaatgtagccccagccaatacagcacctgtatttgagatctctcaatagcgatttgtaccatcatctatcatggtaatttggtggcatatttggcagcatttgatgataaatgttgccagatttgatataataatgtaattattttgggtggattaaccgccctatggcaatgagaaaacctatgaatgcacaagctttaattgagctacttcgcccacattttgccgatgcccacattgatgcggtgaatgaaggtaataaatttgaattgttgattgttgatgatgcctttgagggcaagcgtttggtagcgcgtcagcagatggtttatacacttgttaatcaatatatccaaaacggtgcaatgcacgctttgacgattcatgcgcttacgcctgcagaatatactgccaaaaaagcttaagcttagggataagttatggataagtttaaaattataggggcaagtcgtatcattggtgaggtcaccatttcaggttcaaaaaatgctgctctgccactgttggcagcaatgctactacccaatggtgaaacggtgcttcataatgtgccgacactaaaagatacagccactttgattgaactgattgcaggtactggcgtaaaaatttataaagaaggtaatacggtcacagcagatgcaagtgttgtgacaaattattatgcaccttatgagttggtgcgtacgatgcgtgcatcgattttggtgctaggtccattgcttgcacgctttggtgaagcggaagtcagtttaccaggtggctgctctattggctcacgacctgtggatcagcacctaaaggcactagaagccatgggtgcaactatcgaagttgaaaatggctatgttaaagctcgtgcaccagcaggcggtcgcttgataggctgtgattttagctttgatatggtgacggtcggtggtaccgaaaatatcatcatggcggcaacgcttgctttgggtaccacacgcttagaaaactgtgcgactgaacctgaggtggtagatttggcaaatatgttggttgccatgggtgccaaaatcagcggtatcggcacaacaacaatggttattgagggcgttgagagcttgcatggctgtgaatacagcgtgatagcagatcgtatcgaaacaggctcttatttggcaggtgcactcatgagccgtggtgatgtcttagtgctcaatacatcggcagagtttttacatcctgtactcaaaaaatttgaagccatgggtgcgaccattaccacaggtcacaactggattcgtgcggtgatgaccacgcgtccaaaagctgttgatattcgtactcaagtacatccaggatttccaaccgatatgcaggcacagttgatggcggtgtgctgtttggcagaaggtacaagcacgattattgaaaatatctttgaaaatcgtttcatgcatgtgccagagcttcagcgtatgggggcaaatatccgcatcgatggtcatactgccattgttaaaggtgttgaaaaatttatgccagcgcccgttatggcaaccgatttacgagcatccatgtcgcttgtgatggcggcggcgtgtgccgaaggtgaaagtgttattgatcgcatttaccatatagaccgtggctatgatgatgttgaaaataaactgcgtgggttgggtgttaatattgagcgtatcaaaggctaaagttatcaagactttaacgccattttgaccaaataaaattctgaccttttaccatctaaattgtggcagtagtaactcatgataaccatgacagaaaatttttcaggcttaaccattgctctatcaaaagggcgaattttggacgaaaccttgcctttatttgctaaggcagggattgtaccgctagaaaatattaaccagtctcgaaagcttatttttccgaccacacatcccaatgttcgtttgttgattttgcgagcttctgatgtgccgacatatgtagagcatggggcggcagatattggcgtggcgggtaaagatgttttgatcgaatatgatgcacagatttatgagctgctggacttgggcatcgccaaatgtcgtctgatgactgcaggtgtcaaaggtgcagtactgcctaatcgccgcttgcgtatcgccaccaaatacaccaatgtagcacgcaactattttgcgtctcgtggtgaacaagtagacatcatcaagctgtatggctctatggagcttgctcctttggtggggcttggtgatttgattgtggatgtcgtagatacgggaaataccttgcgtgtcaatggtttagagcctttggaaaccatctgccaagtgtcatcacgcctgattgtcaatcctgtcagctataagcgtaaattggtacagattgagccaattttacaaattttggaaaaagctgtcttggagcagggtgcttaaaggtcgtgtcatcttttttgtttatgatacgcttgttcctgatagcatgttgggtaaaatatatcttgagcaaagccatatcatattttgctgataatctcaccttatctaaagtcaaactttgctgatttcatcaagtaaccaagatttaatcatgataaaacttgtattgaatttgtatttattaaaagagtatccatgctaactttaaaaattctaaacagtcaagatgataactttgccagccaattaaaagatttgcttgcctttgaaacggtaactgatagtacgctgattgctactgtgaatgatattatcgccacagtacgagaagatggtgatgacgcagtgcttaaactcactcaagaatttgataagcacccagccaagagtatgcatgagctgtttgtcagtgctgatcaattaaaagcggcatttgacggtttggctgatgatgtcaaacatgccttacaatacgctgctaagcggatttttgagtttcatcagcatcaagtcgaggcaggttttcgctttaccgatcatttgggcaatagtttgggacaaaaagtcataccccttgaccgtgtgggtatttatgtgccggggggattggcaagttatccgtctagcgttttgatgaatgccatacctgccaaagtcgcaggcgttgggcatatcacgatggttgttcctgcaccgaatggcgagctaaatcctttggtactggcggcagcacatctgtcgggtgtggatagcgtcattacaattggtggggctcaggcagtggcagcattggcatatggtacagacagtattgccaaagtagataaaattacaggaccgggcaataaatatgttgctgctgccaagcgtgcagtatttggacaagtgggcattgatatgattgcagggccatctgaagtgctggtctatgccgaaggtgaacctgatgataatgctgactggcttgctatggatctgttatcccaggcggagcatgacactgtagcacaggcgatttttgttaccacttgcccaagccagttagatgcggtcaaagatgccattgatcatgcgttggcagaactaccaaaagcggatatcgcaaagcaggctcttgccagtcgtggagcgttgattttggtcaaaaaccgagctgaagggattaacatcatcaatcaagtcgcccctgagcatttggagctgtcactgaataaccctgaagaagtggagcaatatgtacgccatgcaggagcagtctttctaggaaggcatacgccagaagctatcggcgattactgtgcaggttctaaccatgtcttgccaacatcaggcacggcacggtttagctcgccacttggggtctatgattttaccaaaaaaacctcgcttatctattgtacaccaaatggtgccaaacctttggcaaaaacagcagatattttggcagtacaagaaaacttggatgctcatgccttatcggcacgctatcgtcatcatgattgatattgatttgaatcatttggcacaatcaaaatctctgcagcagataagcacatcatagttaacatcttaataaaagtgtcggataatcatgagtattgacaaccgtttgtggagtactaaggcaaaaaaccttagcccttatgtacctggcgagcagcccaagcatgataatttggttaaactaaataccaacgaaaatccctatccaccaagcccaaaagcagtgatggcaatgcaggcagtgcttgctgatgaggcttgtgcattgcggctttatcctgaacctgagtcagacgaactccgccaaactttagcagattatcatgggcttgggttagatgaggtgtttgttggtaatgggtcggatgaagtattggcattggtatttgcatgtttttttatgaaacagcgtccattattgatgcctgatattagctacagcttttatcctgtttatgctgatacctttggtgtcacaacccaaagtatcccacttaaggacgattttagcattgatataaaagagtatcatcagtcgtgtgatggtattatcttggcaaatcccaacgcaccaacagggcggttgctgcccatcgaagatatcaaaaagctgattgccatgcaccctgatgcggttgttgtcattgatgaggcatatattgattatgctgatgatgtcaagcaggcatctgcggtgagactgattcgccagtttgataatttggtgattacccaaactttttcaaaatctcgtgccttggcaggtttgcgtgtgggcatggcttttgccaatccaaatttaattgccgcattgatggcaatgaaaaatagttttaattcttatccacttgaccgcttggctcaagcaggtgccaaagccagtgttgaagatgtggcatattttgaagataaacgcactcaggtcatcaagcttcgcaaagcactcacccaagacttgcagacgcttggctttatcgtattgccttcagcggcaaattttgtatttgcaactttgccaaaccatcaagcagctgatttaagtcaggcactacgccaagaaggtgtgattgtgcgtcattttaatcagccacgcatcaaggattatttgcgtattagtgtgggtacgcaagcacaaaatcagcgattgattgatgtattgacgcagattttggcaaaaatggattaaatcaccagttaatcatttattgtaccaaccatatgaaatggtaggcacgctctaaaatcactgatttaactgattgatatttgcatatcatcattgaccaaatgtgtgattattaaaatcagcttaagatgacttaagcaaagccagccgtttgtgttttgcacaaattagccaaaaggaaaataaccatgaccatcattaaacaagatgatttcattcaaagtatcgccgatgcatttcagtacattagttactatcacccgacagattatattgaagctttggttgaggctttggcgcgtgaagaaaaccctgctgccaaggatgccatgacccaaattttggttaatagtcgtatgtgtgccgaaggacatcgtcccatttgccaagatacgggtattgcaactgtatttttaaaagttgggatgaatgtcacttgggatgcgaccatgagcgttgaagatatggttaatgagggagttcgccgtgcttataatcatgctgataataccctgcgcgcttcggtattgactgacccagcaggcaaacgccaaaataccaaagataataccccagcggtcatccatatgcagattgtggcaggtgataaagtggaagtgacttgtgcggccaaaggtggtggttctgaaaataaatcaaagcttgccatgctaaatccatcagatgatattgttgattgggtactaaaaactatccccacaatgggtgcaggctggtgtccacctggtattttgggtattggtattggtggcacaccagaaaaagcagcactgcttgccaaagaatctttgatgagccatatcgatattcataaacttaagcaaaaagccgactctggtgcccagctgtctacgacagaagcgttacgcttggaaatttatgataaagtcaatgcgttgggtattggtgcacaaggtttgggtggattgacaacggtattggatgtcaagattttagattacccaacacatgccgcttcaaaacctgtggcaatgattccaaactgtgcagcaactcgccatgtggaatttgagcttgatggttcaggtcccgttgagcttatgccaccaagcttggatgtgtatccagatgtgacttataatcctgaaaatggtaagcgtatcaatgtcgatacattgaccaaagaagagatagccaattggcaaacaggtgatgtgcttttactgagtggtaagatttacacaggccgagatgctgcacacaagcgcatgacagatatgctcaataatggtgataacagctgtcagttagatttataccaattaagtgtgcatactatcgagagacatgctacaactgagcggatgatatttatgcatccaaacgcacccaaaaaatatttctgtgcttgtagctcagttggatagagtgtcagactccgaagctgaaggtcgcgagttcgatttccgccaaagacaccatcttaataaaaccgctgacaatgccagcgttttttgggttaatggtatcatctatttagcgattattattaatct

SEQ ID NO: 40 - DNA, 119211 bp, Moraxella catarrhalis
ctaattttaacgatgaaacaagagattttactgatcgatgcgcctgcaggtgtgctagaggtagatgccatttggcagtcaggggagcgacagaccaaagatggcttggcgattctttgccatcccaatcctgtccaaggcggcacgatgaataataaagtggttagcaccatgtaccgattttgtcgtgatggtggtatggatgtgctacggtttaactttcgtggtgttgggcgttcaactggtcaaacaggcacgggcgatggtgagcttgaagatgcattgacagtactgcgttatgctttaaagcatacaaaagcacgcaaactttggctgggaggctttagttttggtggatatactgctacacgcttagcaagtctgatgacggataatgaagagttttttgatgtgaatttgcataatttagcactcatcgcaccttcggtgatgcgtgttggcatggcatctttacgctggcaggctgaccatacttttatgatttatggcgatcaagatgaactggtcagccctgagcatttggcacagtttgccaaacaaagagacattcccactaccgtgctttcaacaggacattttttccatggcaaattggttgagcttgggcagagtttacaaaaacacaccaaaatttaaataaatttaaataaaaaatataacaaggatttattatgtcaaatcaaacgccactagagcgttatcaggctgctttggcgactggcgattttagtgaagatgccgttcagctggcggcggtgacttatatggataatttgtatcatgaaattatcaaatcacaagacagctcaggtagtgggtggttttcaagcctatttaaatccaaaccagtcatgccaaaaggtctgtatatgtggggcggggtagggcgtggtaagacttggatgatggacatgttttatgaaagcctgccaatcaagcgtaagatgcgaatgcattttcaccactttatgcagcgtgttcagcgagaattagtggcacttcaagggcaggctgacccccttaaaaaagttgccgatatcattcatcaagaagctgttgtcatctgctttgatgaattttttgtgtcaaatgtatcagatgcaatgattttgggcgatttatttagcatgttgtttgatcgtggcattacattggtggcaacttccaacattgaaccatcaggtctatacaaaaatgggattcatcgtgatagatttttgcctgccatcgctcaagttgaaaaacatacgacggtcatgaatattgatgctggtattgattatcgtctcaggcttttaaagcaggccaaactatacagctcgcctttgaccgatgacaccaaagattggctgtcagagcgatttgacaccttggcaggcggtcagaccatcagcacatcgccgattgtgattggcggccgcaatattgatatcattaagcgtacagaaaccatgctactggctgattttcgggcgctttgcatgcagcctcgttcagcagcagattttattgaaattgccaatgattttgataccgttatggtggataatgtacctgcactaaatgatacgcttatggatccgacacgccgctttatttatttggtggatgaattttatgaccgtcgtgtcaaattactgatacgagccgaacagtctattttgacactttatcagggtgaaaagttggcatttgagattgagcggacacggtcacgcctgcttgaaatgcagtcagaggaatacttggcagaagaacatcgcttggattaagatgaattcagcgatatgaatttttaataaaaattaaggataaaataatgacaaatgagattttaaatattattcaccaacgccgcagtatcggcaacctatctttgcccatgccaaacgatgctgagctaaaatcggtattggaggctgcgatggtagcaccagatcataaacagttaaagccatggcgattttgggtattgacaggagagacactgattgaatttggtcaagtgttgttatcagcagctgagcatgaagcggcatcatgtggtgagatattagatgaagttgcgatcaaaaaaatactgaatatgccgcttagagcacccatgattattgtgattgcaaccgaatatcagtatcataaaaaagtaccaccatttgaacaattgctcagtgcaggagcagtcgcccaaaatatgttgcttgcacttgagtctttgggctatcgcagtgtgtggcgtacaggtcctttgtgtaatacgcctgaggtaaaagattattttggtgtgacaaaacaaaataccatttgtggcttgatttatacaggttcaagtagtgttcagatgccagatcgtgagactgtggatttatctgactatgttgaatatcgccaataactgattatttatgaccattgaaaggatgcatgccgtatgaagctgcgcaaaccgaatgtcaaaaaccaaaaagtacaaaaaattgtcgatgctgccagcatcggtattgatgatgcggtaagcgctatcaaagaatcgggtctgccaaataaaccattgatttctagcatcgctgaactgactggactaaaaaagaaaaaatcagctcaactggttgaatcaatgcaggcaacagagcagatcgcatcggatattcatcagatgagttttgcctttttgggcggtggaagttttggaactgccatggcaaatttggcggctaaaaacggttgtgatgcgacattgtgggtacgagataagcgcactgtcaagtctctgcataaaactcgaatcaataaaaaatatttgccaaatcataagcttgatgagcgtttgaaatttagtcacgatctgaaaacagcagtggcaggcgtggatgtgatttttgttgcagtacccagctcggcatttcgagagatgctgaccaatattaagccctttattacacaccaagctgtggtttcactgactaaaggcatggaaaaagagacttttgcgatgatgagtgatatcatccaagaggtgttgcctgaggtgaattttggtgtcatgagtggaccaaacttagcggtagaaattatggataatatgcctaccgcaacagtcattgcctcagcatcagaaccgcttagaaaagctgttcaaaccgctttacatagtgcattttttcgtgtttttgccagtagtgacattaaaggcgtggagcttggcggcgcactaaaaaatatctatgccatcgccatgggtatggcggcagcgtatgatgtgggtgagaataccaaagccatgctattgactcgtgcattagccgaaatgagtcgttttggtgtggcggttggtgctgatcctttgacttttttaggtctgtctggtgtgggggatttatatgctacctgcagttcggtgctaagccgtaactatcgcatcggctatatgcttggtcagggcataagtcttgaacacgccatcaaaaaattaggtcagaccgctgaaggtgtcaatacaattcttcaagtgcattctcgtgccaaagcactgggtatttatatgcccatcactcatgcactgcatgcggtattatatgagaataaatctgcacttggtgttgcactcaatttgatggaaacaggctttagaagtgatgtggaatttgttttgccgcatgatgaaagcaatgtacgcttgagccatgagtttagtgaagtgctaaagaccagtgccaatgctaagcccaaagatgaaattcaatccagtgatatgccttagctttggtatatcaactgtattaaggataaatgatgaaagttatttttgtacgacatgggcaagcagccccgtattgtgaagatgatgcagggcgagatcttaccgactttgggcgtgtgcgagtacagcagacagcacagtatcttgccaagcattatcagcttgatctcaatatcgcaagcccctataatcgtgccgatcagactgctaagattttgttatcttgggcgatgactttgggtcaaaatccaagttttatgagcttaaacagtattacgcccgatgataatcctatgattgctatcgatgaccttgaagatatcgtgcgtacaaagttcggtgaagatctggatgataaatgtgttgcggtggtctgccatatgccgattgtagcgtctatggttgccaggcttgagaatttaagcccagcctcatttgagttggcagaagcacggattttacaaatgccagttttggcacaaggtttggcaacgacccaagatgtgtttatccccaaccaatcttaatactttttaaaaacgatcaaaatttttcttgcaaacttataaagaattaattataatattgacttggcttcatcggtagcttcgcaactatgtactatgaaccccgccaggaccggaaggtagcaacggtagtagatacaaagtgtgccgaagatgtgctgatggagccattttttatgtctataaaaagccatgtatcaacatggcgttttggtgattgttaagattaaggctcaagataaggattatcaataccaagctgtgctaagatttcaatctcaaaaccctccatttggtcagcatcagcatcactaatttcatgatcaaaaccaagtagatgcaataaaccatgtataatcagatgtgtcaaatgcgactcaaaacttttgttttgttcatctgcttcattaagaacaacttcgtggcacaacaccagctcaccaagctcaatctctccgagtaatgtggtcatctcagtgggtagctcacttggataagaaagcacattggtggcataatctttacctctggccgctaagtttacagcacggccttgggcatggttaaccacataaatgctgacagatttgggcatatgccaaatctgtatggcatcaggaaaataaacaaaatcgatcccatgatgtaatttttgggtcatgatggataaagttgtctcaacaatcttgtttaaatcaatatcaaaatacaaagattggacagtgtttgttaaatcatcatcaaaacccagcttgatttcattgggcatcgacagccccttgtaattcggttttttcttcattggcaattgactgtttggtcagatgcagtgctcttctttcggcggctgccgcctgttgcacctcatcaaattgatcataagcttgaacaattttttgaaccaaatgatggcgtaccacatcgttactatcaaagcgagtgatatgaatttcatcaattttggataaaatttgtaaagcttgagccaagccagatttgtgaccacgaggcaaatcaacttgcgtcatatcgcctgtaatcaccgctcttgaaccaaagcccaaacgcgttaagaacattttcatttgttctggcgtggtattttgtgcctcgtcaagaatgacaaatgagttattcagtgttcgtccacgcatataagcaagcggtgcaacttcaatcacttgacgctcaagcagcttaccaactttttcaaagccaagcatctcatacagtgcatcatacaaaggacgcagataagggtcaattttttgggtcaaatcacccggtaaaaatcccaatttctcacctgcctcaacggctggcctaaccagtaaaatccgttcaatctctccacgctcaagcatatctaccgcacatgccaccgccaaataggtcttgcctgtacccgctggcccaacaccaaaagatacatctgaaatcaagattttttttgtgtactcttgctgattgtagcctcttggtatgatcttgcctttgcgtgtacgcaaagcgacattagtatcgcttttatcttttgagttgccactatgatcatggtgcttaccttgagtgttagcataatcataatcacgagataagcttgattgaataattaaatgaagctcttctccactaatattatgctgttcgccagcaagctccaccagtttgttgatgataatttcggttcgctcaaccaaatcaagctcacctgtaataataaactgatcttgtcgctgagtgatttggacctcaagtcgttcctgaatgtatttgatgtgtttgttatattcgccaagcaaagtgcgtaattcatgcgtgtttagattggtttggatggtgcgagtgatgctcaaagactattccttttattgtggcaaataccttggttgacagtgataaattgcaatcaaatcaaataatcaaccaattgccatgtgatgaaatcaaacaacgcttacattgggattatcagcgataaattcaatcttttgagtagattttagcgatcgtctttttagtgtatcaaataattatgctaaaataatgaaaagcagtcaaattttgactgctttgtaatcgattgaaacatgcccaatcattgcgtttttagcatatgaccttcaagataatgaatattttgtgcctcttcacaaaatgcctcatcttgcaagatgacatctcgatgtaaaggaatgttggttttgatgccctcaataaccagctcatctaaagcgtgcaatgtcttagcaatagcttgtcggcgagtttgggcatggcatatgagcttaccgattaaagagtcatagtagcttggaatggtatagccttgataaagatgtgaatcaaagcgaatccctgaaccacttggagtgaataaacgctgaatttgaccaggtgatggcataaaagtttttgggtcttcagcattaatacggcattcgatggcatgacctcgaatcgtaatttcatcttgatgataggataatccataccctgcggcgatttttaattgttcgaccacgatatcgatgcctgtaatcatctcggttacggggtgctcaacttgtacacgggtattcatctcaataaagaaaaattcaccattttcgtataaaaattcaaaggtgcctgcaccacgataaccgatttttttacaggcatgaacgcatgcttctaaaattggcgtacgaacctcatcaggaatatctggagcaggtgcttcttcgagtactttttgatgcctgcgttgcaatgaacagtctcggtcaaataaatgcaaagcattaccattaccatcacccaacacctgtacctcaacatggcgaggattttttaaaaaacgctccatgtagaccgtatcatcaccaaaggcattttgagcttcggttttggcggcttgaacttggattaacagttcttcaaaacgctcaacaactcgcatgccacgaccaccgccaccagctgcagctttgacaatcaatggaaagccaatttcacgagcttgctcttcagcattacctaaagtgattgcaccgatagaacctggtaccgttggtacgccagcttctttcatggcattgattgcagaaactttattgcccattaatcgaatgtgctctgggtgcgggccaacaaaagttaagcctgcctcttcaacccgttcagcaaattcagcattttctgacaaaaacccatatccaggatgaatggcatcagctgcggtaatctcagctgctgccagtagggcattaatatccaaataactgtgagcggaaggcgcattaccgatacataccgcttcatcaacaaagcgtaagtgcatcaagtctttatcagcagtagagtaaacgcctactgtcgcaatgcccaattgcttgcacgcacgcacgatgcgtagagcaatctcgccacggtttgcaatgagaagttttttaatcatagtgtcttcctgttaggctttgtagcgaatgacaggctgaccaaattcgaccacttcggcattcttaaccaagatttcttcaataataccgctttgggtggcttctaagggattcatgattttcatggcttcgatgataccaagcgtatcaccagcctcaactttttgacctactttgacaaaaggaggatcattagggctgggtgctgaataaaagacgccaaccatgggcgaagtttcaagctgaccacttggcttgacgacagcaggagttgtagctgacggtgctgctgaaacaacttgggtggtagcgactgtctgcacggcagtattacgagtaaggctgatgtatttgtcatcataaccatattccaaatttaacagatctttttcttccatcagatctaaaagttcacgaatttttttgatgtccatcagtattaccttgataaaaataagaatgttaatattacgccagtcaaaaggctatccacccctttagcgagcaaaacttaccaccgattaagcaaacagccaagatggtttaaaaattatctttatatagtgtacattcgttttattttattgcaagtgtttttttgtcatattttggtacaatttggcaaactgatgtctgtttaggtgaatttgggtacagtataagccgatgtctcatccatccaactgggcttgacccatttttgagattcggtaaaccggtaagttgccatttttgtcagtagtgtggggatgttgtcggccacacaaatcaaattaatatttgaaacgggcataaagcctgcttttgctgtctgttcaagcaatttaagaaaagggttaaaaaacccatcaacattaagaacaccaatcggcttggcgtgctgacgcaattgtgccagtgacatgacctcgaaaagctcttcgtaggtaccaataccaccaggaagagcaataaaagcatctgctaaggatatcatctttagtttacgacttgccatatcttctgtgatgataagctcgcttaggccatgatgagcgacttctttatccttcaaaaatctgggaataataccaatactttttccaccatgtgcgatgatgctgtctgcaatcgtgcccatcaagccaacattgccaccaccataaaccaaggtgatgtcatgctctgccaaagttttacctaagctttgggcggcatgataataagcaggtgtatcgccaaagtttgaaccacaatagacgacaatgcgtgcaaatttatcttgataattcatgtgtataatcaatggttatattcaggtgtatttaaaacttctaaaatatgttctttatagggtcttaatgctggtaaaatattgtttgtgattaaactttgacgataaccaagcaattcaagcggtaattcttcaattaagccatcataagcaaccaagaccaataagtcattcatccaacggttttttaataataaattagggggaatgtagtggctttgactgtaggcattgatgatatcatttaagtcatttttaaagggtttggatttactatgataagtcggtggcggtaatgcaggcagattgccatcaggcatatttttgacttggcaaatgatgcgtacaatttcgttaccatagcgtcttagcacagctcggttgatggtagtacgagccaaaagcttgatactatcaggcatgtcttgaacaatttccctaagtgcctgtttgctgataataaagcttctgggttcattggttgctcttgccaatgcttcacgccaaatggtgagctgctgaagtactcccaattgacggcgattataaatcggtgctaataagtctagatacagcatctcatcgggttgattttgaatggtgtgcagttctcgagcatagtgattactgtcttcaaggacgcaatttaaaatgccacgagctgccaattcggtgcgtacaacttcatataattttaataagtagcggacatcattagcagcataagtctcttgttcataagacaaaggtctcgctagccaatttgactggctttcgcctttatcaatctcaatgccaagcatttcattaagagcttggctataaccagcttgtaatttacctgataaataagctaccccaatttgtacatcaaaaatattggtcagtggtgggcatttggccagtaaataaaaaattcccaaatcttcgccgcatgcgtaccataccattgttggtacctcagcaagtgcttgccaaaattcggtcaaatccagcttaggtgcgtcaattagataaatggcattgccggtattgatttgtatcagtgccaaaattgggtaataggttgttcgtttgataaattcagtatcaagtgcgaccacatcgctagcatcaatctcatcaatcagtgcgtacagatcatcatcattttgcacccaaatggttggcagtccatcacaagccgcttgattgatggtaaattttggaaactcaagagttggtatagtcataattgatcattatatattactacgatatattactgcgattttgtagtgcttgatgtagtgtgatgctgtccacatatccaagttcaccgcccataggaatgccctgagcaagacgggtaattttgggtacatgggtacagatggcatcatgaataaaaaaagccgtggtttgtccttcaaccgtggcaccagtggctaagatcacctcatggatcgcttcatgcctgatgcgatgaatcaactgatcaatatgcaaatcattggcattgataccatcgatgggcgataaatgcccaccaagtacaaaatacttgccacgataagcaccactttgctcaatcgccatgacatctgatgcattctcaacaacacatagtagcccatcatcacggcgatgatctaagcaaattgggcaaatctcatcatcactaaaggagtgacactgcaagcattctttaatgtcgtgcatcgcagtctcaagtgcagccgccaaagataatccttgggtgcgttttttggtcaaaagctgtagcgccattcgctgagctgatttttgtcctacacttggtaagacttgtagctctttgatgagtttatccagttttggggtgagcatttagccaaacaagcctttcatactaggtggcagacccatgccagttgtcgcaccagccatcacctcttcatacagttcatctgcttgacgcaccgcatcattaattgcggcagctaccaaatcttctatcatgtcaggctcatcatccattagacttgggtcaatggctaaacgcttaacgacatggcgacctgtcatggtaactttgaccaagccattgcctgcttcgccttgcacttccttggttgcaagacttgctttggcagcttcaacatttttttcaacttgtttttgcatggcttgggcttgttgcattaatgcttgaatattcataggcaatcttcctaagatgtaaataattaactaaataattgacacattatagcatataatctgagtgataaaaatgcaagaaaatccaaactcagcaattaatgattaagggatattatgccataaatataaaattagcccaacttggcaaacaaattgggcgatattttgatatcttaaagcttgcacgcaccacctgcacagccatcgtccaagtcgccttgggcatcatcagcaccatcacgcgtattatgataatataaagttttgacaccaaatttataagcggttagcagatcttgaatcagcactttcatcgggactttaccaccttcaaatttagtggggtcataattggtgttggcggagatggactgatcaatgaatttttgcatgattccaaccaaacgcagatagccattattatcaggaatattccaaagcagttcatattgacttgccaagcgttcaatctcaggcacaacttgctttaaaataccatctttagacgctttgatggataccaaaccacgaggcggctcaatgccgttggttgcgttggcaatctgagagctggtctctgatggcatcaaggcggatagggtagagttacgcaaaccgtagctttgatatttgtgcgtagactttcccaatcaagatgcaaaggttcggtacaaatgctgtccaaatcctttttataagtatcaataggcaaaatgccttggctgtatttggtttgatcaaaccaagggcaagcactttgttctttggcgagtttgtttgatgctttgagcaaataatattgcagtgcctcaaaggtacgatgggttaaaccaagcgccgctgcatcggagtaacgagttccattttttgccaaataatacgcataattaatcacgccaacgcccaaagtgcgacgattagtactgccttttttggcggcaattacaggataatcttgataatcaagcaacgcatcaagcgcacgcacgatcagctcagcaggctcttcaatatcggataatttttcaatcttacctaaattaatcgctgataaagtacacagcgcaatctcacctttttcatcattgatgttatccaaaggtgctgttggcagggcaatctccatgcacaaattagattggcgaatcggtgcgaccgtcggatcaaaggggctatgtgtgttgcagtggtcaacattttgaatataaatacggcctgtgcttgctctttcttgcagcattaggctaaataaatcacgggcaggtactttgcgtttacgaatattttcatcggcttcatattgggtatataatcgctcgaaagtttcttgatcggcaaagaatgcttcataaagccctgggacatctgagggtgaaaataaagtaatgtcagtgcctttaattaatctggcgtacatggttttattaatctgtacgccataatccatatgacgcactcggttatcttcaacaccacgattattttttagcaccaataagctttcaacttctaaatgccaaattgggtagaataaagttgctgcaccgccacgaacgccgccttgagaacatgatttaacagcagcttggaacattttaaaaaatggaatgcagcctgtgtgctgtgcttcaccaccacgaattgggctgccaagcgcacggatagcaccagcattgacaccaataccagcacgctgtgagacataacgcacaattgctgatgttgtggcattaatgctatcaagattatcgccacattcaaccaaaacgcacgagctaaattggcgtgtcggtgtacgcacccctgacataatcggtgtgggtaaggagatgtaaaaatttgaggtggcatcataaaaacgcttgatatagtcaaggcgttgtgctttatcatagcctgcaaataaacacatgcccaccaacacatataaaaattgcggactttcataaacccgtttggtcacacggtcttgtaccaaatacttacccatcatttgctcaacagcagcatatgctaggttcatatcacggttatgatccacataatcattgagctcattaaactcatcaatactgtaatctgccaaaatgtgctgatcatatttaccttgttcggtaagatgcttaacatgagcatacagatgcggtggttcaaactttccataagcaatcttacgcaggtgaaaaattgccaaacgagctgccaaatactgataatctggcgtttctaccgaaatcaggtcagcggcggctttgatgatggtttcgtgaatgtcacgggtgcgaatcccctcataaaattgaatatgagattttagctcaacttgagaaacagacacattatttaagtcttcagcagcccaagcaatgactcggtgaattttatcaagattaatgggttcaaggcgaccatctctcttggtgactttaattgtatcaatgtgcgtcattatggctccaaaagttttgaatacagtttttgatcagtcgttgtatcagatatacgatcaatcatgtgacaaaatgagtgagtatcgcccaatgaggctaatcaaccactttgataatttatataccatatctagtgtatggatggttttagggcaacaatatatcctattttttcttaaaataaaagattgattaattattaaaactatgattcaaatctcaacttcaattaaatcaatggcttgtacagaaaaaaatattcaagttttttgtaatttgagaatgggttatttttgatgataaattttaatcaaaaaattgtgaatataaatcaatttatttaaatataaatgtcaaaatgttgtcaaaaaagtgagtctaaattggttgaaattgtgtcaaatttcatataaaaaagccgccatttggcagcttattatattattgtttaattaagataaacttattaaattttggtaaatttggtacggctaagattgggtgtacgatgttttggtgtgtgttttttgcgttcttctcgtcgctcgtgggcttcgtgcttttgacggcgtatctcacgagattttaaaggttttttgtgaatgcgtgcttgtttttctttggtagcgtgatttagccctgtaccttgacgctgacgcagaccaacagaatcaaccagcttgccaatatcactggcatcaagctcaataaaacgacctgtacgcaattctttgggcaaaattacggtgccatagcgtgtacgaatcaagcgagatactttgagtgtttggctttcaaacatacggcgaacttctcgttttcgaccctctttgatggtcacatgataccatttattgacaccaataccgccaccttctttgatgtcatcaaatttggcaacgccatcttcaagctctacaccagcggtgagttgactggcaatttgtgatgtaacctcgcctaaaactcgtacagcatactctctgattatcccactagaagggtgcatcaggcgatgtgcaagctcaccatcatttgtaaacagcaaaagacctgatgaattgatgtccaagcgacccaccatcacccagcgatcgttagtgagttttggtaaacggtcaaaaacggtcgggcgtccttgagggtcagaggctgaacagatttccccttcaggtttataataagcaatgacacggcgacgcttttcacgctcggctttcaggcgtacttgacggccgtcaatgcggatttcgtcggttaagataaccctatcgcctaatgtggcgactttaccattaatggaaatgcgacctgatttgatgatctcttcaagcccacggcgtgaacccaaacccaatctggcaagcagtttttgtagtttttcgccagcaggtttgttggttgcgttttgttcgttgatggtggagttgtttttgggttttgattgattcataacttaaatccagaaaattggttataacattatctcaatgtgaaatatatcggtttaatggttgattagcctagataaacacccacgaacgctgatgaaaaacttgtcatcatacatgattcatctgagtttaacaagttcattataagttcattgtctgatttttaggtggtcaaggtcaggcagtggtggcaatctatctaagctatctagcccaaacgcatccaaaaatgcttgggtggtgtgcagtagtgcagggcgacctaaagtgtccttatgcccattttcgacaatccagcctttatcaaataattgtcgcaaaatattgctagagactgccacgccacgcacctgctcaatgtctgatcgtgtgacaggttgctgataagcaatgatgcttaaggtttcaagcaaggcttgacttagattttctagccgctcaggaaaaacctgctgaattaggctactgtagctgtctttgatttgcaagcgataaccgctggcagtcttattgagtgtcaatacaccataagacagccgttcttgcagaatggccaaggcatcttgaagttcatttgaaccgatcatcagatgtttttttaaatctttatcggtcagcggtgtttcgctggcatgtagtaaaacttcaatatatcggctgaaagtttcagcttgcttgtgagcttgcaaaaaatcagaggtggtatgttgtgtcataacagattcatgattatttaaaaaatgagtatataaaaatagctacttaagtgaattaaaaactaacagcgattaatgtagccaatgtaagctttgttttgttaaatcttgcccattttggttatcatgataagtatcatttttggttggattaagcttaccagaattggcttcatcaaatccgattaaacctcgtttcatcagctcaagtacagccacaaaactcaccacaatgcctattttgccttgagatttatcaatcagttcggcaaaggtactaacgcctttttcgcttatcaagcgtgtaatgctggcgatacgctgagataatggcacgctgtccgcttgaacagtatgggtaatagcttcagggcgaattttcatatgaattaagctttcgaccaaaagctctggcgaatacttgggcagctgcttttgcatggcttcgggacttggcatactggtaaatgctaaaaaaacatctctttctagacgaagcagaccatcgatacgccgagcagcttctttgatttgagcatactcctcaagccttcggattaatctagccttagggctaatctcatcatcatcaactttagattggggcaataacaactcagatttaatggcaatcagtgtacttgccattaataaataatcacccgcaagctcaaaatacgcttcatccaactcactgatatagcttaaatattgctcggtaattggcaagatagcagtttcagttaagtcaaaattattttttttgactaagtacaataaaaaatctaaaggtcctgcaaactgttcaagccaaatcgcaaatgcctgtggcgggatatataaatcttcaggcaaatttagtactggtgtatcaaagatgcgtacatcagctgtttttgatggtgctggattatttgatatggtgatcatgatttaagcttggcaagtggcttgatgccaatggcacggcgagttttatccagctgcttttgggcaacacgccgagccttagtagcacccatttgtaaaatttcttcaagctcttttggattattcattagatgtaaataacgctcacgataaggggcaatttcatgattgattttattaaataaaatctctttagcttcaccccagccaataccacgacgataatgtgttgccaatgcttcaatctcttcaggcgtaccaaaggctttgtagatttcaaaaatggtgcaatgctcagggtcttttggctcttcgggtggttgagaattggtgacaatctgcatgactgcctttttaagcgctttttcagggtcaatttgagggttgccatcaccaaaaagtggaatggtgttaccataactttttgacatttttcgtccatccaaaccagtcagtagcggtgtgttttcgtcgacaacggcaaaaggctcgacaaataagggtttgtatttaaaattaaacgatcctgcaatgtctcttgccatttcaatatgctgaatttgatctttacccacagggacatgggtggcattaaacatcaaaatatcggccgccatcaagacaggatagccaaataatcccatgctgatgccataatcaggatcggtatcttctttacttaaattcatatcgacggcggctttataagcatgggcacgattcatcagccccttggcacatgagcaattgagtatccatgccaattcaggaatctcaggaatgtccgattgacgataaaaaataactttttcaggatcaagaccacatgccaaccaagtggcggcaatcgctcgagtagagcgatgaatttcatcagggtcaaaacatttaataataccatgataatctgccaaaaagaaaaacgcatctccatcatgattctcaaaggcacgatgagcctcggcaatggcggggcgaatggatccaacataattacctaaatggggaatgccagtggtggtgatacctgttaggatgcgttttttagttgtgttcataataatactcttattttatccttaaatttaattaaaatatgttaaattgtctttaataactgtgataatgcaccacctgcgttatcagttttcataaattgttcaccaatcaaaaaatggtgaatatgattttgttgcattcggtgaatatcggtggcatgatgaataccgctttcgctaaccacaagggcatcttgcccaagattggcaaatagtcgttgggataagcgaatgctattttctaaatctacctgaaaggtatttaaattgcgattattaatgccgtagatattgtgagctgatttgggtaaatttagtgcttgggttagctcatcatcggtgtgaatttcaatcaatacatccagacccaagtcagttgctgtttgatgtaagtgtaaggcggtatcagcatctaaacaagccatgataagtaaaatacaatccgcccccatcgcagccgattcaataatttggtattcatcaaccatgaaatctttacggagtacaggtaagcgaacagccttgcgggctttaataagatagtcatcatgaccttgaaaataatcacggtctgtgagtacggataaacaggttgcaccagccttttcataggcttgtgctgttgtcacggggttgaaatcttgacaaatgatacctttggaaggcgaggctttttttacttctgcaatcacaccaatatcggttgttgtatcaactgctcttagcgcatcagcaaaacctcgaggcatgtggcaagctgccgactttaaaagctcattggtcgttttgatggctttggcggctgcaatctcttggtgtttggttgcgatgattttttgaaggatactgggggtgtttgttgtcataagcttgtcatcatccttggtatttggacttgttattcacagtgctgggtaaagtttgtaaatgcatttagcttatctaaagcttggcgacttgtcataatttgcttggcaatggcaacgccttcggcatgtgttttggcatggcctgccacataaatagcagcacctgcgttgatggcaatcatcgctcgtgcctttaggctgatatcatcatttgctgtgccgcccagtgcatttttgatgatttcaagactttgttttgaatcattgacagtcagaccatataaagttcttgagacaataccaacatcttcaggctgacaaagataagtatgtaccttaccatctttaagctcagcgacatgtgtgcccgtggcaagactaaactcatctaagccatcttgagaatgcacgaccatgacatgggtaagaccaagtttagcaaaaacatatgccaatggctcacacagttcagggctaaaaacaccgaccacagcacggctaaccttagcagggttggtcagtgggcctaaaatattgaagatcgtacgaactttgagcaatcggcggacaccaacagcatgacgcattgcagggtgatgattgggtgcaaataaaaatccaatgccaagcgtattaatggctttgactgtctgagttttattaatatccaaacgcacgcccgccaagcttagcacatctgaagagccagagcttgttgatacaccacgattaccgtgtttggcaatggtaacacctgccgccgctgccacaaaagcagatgctgttgatacattaaataagtttgaaccatcgccaccagtaccaacaatatcaactgcattgggattgcaaatatcaatggtatcggcaagctcaatcattgttttagcgcaagtggtaatttcatctatagactcacctttttgccgcaaagcgatcaaaatggctcccatcaacgcatcagggcaacgaccttgcatgatgatgagcatgacttgacgcatctcatcatgggttaattcaatattctttagcaagtggctaagggctttggtcaaaatagccaagatatcatcatcggtcatgatggcaatattatcggcggtgatggtctttgtcataatatttggtttatttttccagtgtaggactgcctgtcgtgaatttagattgtcaatctgttatcaatttttgatcataggtttcaataataggcatgctaaattaattaattgcatgcgtattttttggtatcagacaactttgggtaagtgactattttcaagctttgccaacccacaacgctttaaaaagttatttaataattgataaccatattcgctcaaaatagattcagggtgaaattgcacaccttcaacatcaagcgatttatggcgtacgcccataatttcttgcatacgaccatcagcatgagctgtccaagcggtgacctctaaacaatcaggtaggcttgccttgtcaatcaccaaagaatgatagcgtgtggcattaaaagagtttggaatatcagcaaaaacaccttgattggtatggtgtacagatgatagtcgcccatgcattgcctcacctgcacgcaccacctgaccgccaaacgcttgtccgatggcttgatgacctaaacagatgcccaaaattggaatttttcctgagagtttatctaaaatctcaagtgttacgcctgcttcgtttggactgcaaggacctggacccaaaacaatcgcttgcggtgcaagcttgatgatttgatccaaagtggcttcatcgtttcgccaaatggtcatctcttgttgtaattctccaaaatattgaacaatattataagtaaaactacaataattatcaatcatcagtatcattttaataaatccttgatttaaatagatattttgattttaatcctttatccatactcgcttggcactggctttgagcgatgatggtaatatttgacccattagcagttattttgttcaaagcaataagtcaggtcgtgcctgttggttcggtattgtaccatttttttagcggtggtcaaatcagtgtactgataatcagtcaagtaaaattgccagtcagcagtttaccaaatggtattggcaggttcatagtgcatgatttgggtaatgtgattgttggcatcaaccaaaacaacattgggcttatgattttgggcatcaatatcctgcatcatcacataattcataataatcacaacatcgcctggctgtactttacgagcggctgcaccatttaggcacaccacgccactaccacgctcgcctgcgatggtataagtttcaaatctttcaccattattattattgacgatgctgactttttcattcactaagataccagcggcatctaataaatccacatcaatggtgatactgcccacataatttagattggcttcagtaacagtagcacggtggattttaccacccaaaagtgtacgaatcatggttgtattttccaaattaataattatcattaatgttgatagtaattggtgtcatcggcttgagttttaaagcggcgatgaaaccacatccactgggttaaatctttttgaatattttgctcaatcagtcgattgatgcgttcagcatcggcggtttcgtcatcgctgggataattttttaacacagcgcttaggctgatgtgataatgtggacggtgaccttttgcgatataatcgggcgtttgtctgagcatatccatcatgatgatgacaggaggattggctttatcacccagcttaataagacgacgctgagcggtaatcgttgctgcaggcacaccaaaaaaggtcgccatcacgccatgctcaagaccaaaatcttgatcaggtgaataccaaattatccgaccttgtttgagccgagtgatgagttttttcatatcacgatttgagatttgctcatcaaagatacagcggcgtgcattatagataaaccattcaagcaaagggttgttttgtgggcgatacacgcagtccgccgcaaaaaactgtgtacataaccgaccgcccaaatcaagcgtcgtgcgatgtccaccaagtaaaatcaccgctttattttgtttttgggcatcaatcaaatgctgtaaaccagaaatgctaaaagtgcgtttaaagacattagggcgaaaccatgcacataaactttcaaaaataccaataccttgattaataaatacttgccgtgcggtggccttgtgttttgattttggttgatttgggaaggtaagctgcaggttggttagagtgtcttgaactcggcttttagctaagtaatgtaccaaaatgccaagacgcttgccgatccaaaactgccaacgcagcggtagaaaaatcagcggtaaaatcaacgcaaaagccagccaaactccccaatatttgggatgtaaaaacgcccattcaaacgattttggctcagcttggctactttgtttatgagtatctgtcaagcttggcatatgcttaatggatatggcgtgtttgggtgtctgcttatgctgatgatggcaactcatggatcatattctttattaatggtactgtttaaacctgtattttaaagtttattgggtcatattttcaagctcatcccatcgctcaagcttcatcatcaaaagctcatcaatctctaccaatcgctcaccagccttcgttgctgccgccaaatcggtattaaaccatgaaccatcttcaatctttttggcaagctgtgcctgctcttgttcaagtgcagcaatttcattaggcaaatcttcaagttcacgctgctctttatagctgagtttgcgtttttgggcaacgcctgattgaggtggtttgatttggatgggttcagcgggttttgtcgccttaggtttattgtctgtggcgtgatgagcaagccatctttcatgctgttgtacatagtcttcataaccgccaacatattccaaaacgataccgtcgccgtacttatcagtatcaaatacccaagtttgggtaacaacattatccataaaagcacggtcatggctgatgagtaataccgtgcctttaaaattgaccacaaaatcttctaaaagctcaagtgttgccatatccaaatcattggtaggctcatcaagcaccaaaacattggcaggttttagcaataatttggccaataaaacgcgtgctttttcaccgcctgatagtgctttaacaggtgtgcgagcacgatttggcgtgaataaaaaatcttgcaaatagcttaaaatgtgcgtagtttttccaccaacatcgacatggtcagagccttctgaaacattatctgcgatagatttttcagggtctaggtcgtctttgagttggtcaaaaaaagcaatatttagattggtgccaagcttaactgaacctgactgaatcgctgaatcatccaaacccaaaatgcttttaattaaggttgttttaccaacgccatttttgccaatgataccaactttatcaccacgaacaagcagcgttgaaaaatccttaactaaggttttattgtcgtattctaaagttaagtgattgacttcacaaacaatttttccagatttttcgctattgttttggctaatttggacagtacccaacacatcacggcgtgcttttcgctcttcacgcatggcttttaaggcacggacacgaccttcgttacgggtgcggcgtgctttaatgccttggcgaatccaaacttcttcttgggcaagctttttatcaaattcggcaaatgatttttcttcactggcaagttcaagcgcttttaactcttggtagcgtgcgtagccacccacaccttgcgtcacatcatagccagagagttgaccacggtcaagctcgatgatataagtggcaagtgtatcaataaacttcctatcatgcgagatgaaaagaacggttaatcgttcattcaataaaaatttttcaagccaagtgatgctttcaatatctaaatggttggttggctcgtctaaaagtagcacatcaggatttgttaccaaagcctgtgctaacaaaacacggcgtttacgaccccctgataatgttgataagcaagcatcggcatcaagccccatgctgtcaatcaatgcacgcgcacgccgctccaagtcccaaccgttcagagcgtctaaggtttgctgaagaccgctcatgacatcacaggcttcattgtcgcccatggcacagtctgcactggcttgatgatagttttttaaggcttgggcaactttgtcatcaccctccatcaccacgtcaaggacgctggccgactcatttggcacatcttgtgccagcatggcaatttttgtaccatctttgatgagtatctcaccatcatcagcatgtatttgacgcataatcagcttaaataaggtggatttgccttcaccatttcgaccaatcaaacaaacgcgttcattgggttttagggtgaaatgaacgccatctaaaatcggcgctgtgccaaaggctaaatgaatattttttaagtgaattaaagccataagatgaaaagcgatacagtaaaatcaatgataaaaaagtgatgaaagattgtcaaaaaccaatagactaactatcatatcaaattttaaccaaaaattgtgcgttatgtcgtaaaataagccaaattggtcaaagatttacccaaaaaccttaatccaaaaccttaatacccaataaatgagttgatatttttatgcctgatgtcttatttaccaaagattttaccttaattgatctacaaacacgcatcagctttttggaggatacttgtgatgagcttagtaaaattattgctcgccaagaccgtgatttaagagatttgcaagatcagttaaaactgatgtaccaacatatccaagccaagcaagacgatgtaggcattgctacatttgatttattggctgatagaccgccacattattaaatccgattgatttacccaatattgatttacacaatcaaatatcaaccatcaaacaaataaaaataaacgctaaaaattgtaagaaaatatatatattttacttgtttagtgattaaatttcatataagatacaaatgtgtaagacttttgtactgttctataaagaagtatggacagttttacatattgtaaggactgactttttggagaaagtgatgagcttaaaatttggatacaaagcgctgagtttggcggtattttcaaccctaaccgcaaccgcagcacaagcagcaggcctggatcgctcagggcaagatgtgactgcttttttacaagatggcacttatgccgaaaccgtttatacttatattgatgccaatgttaccggtaaagatacctcaggcaaagatacaggtgatattgccgaagcttatgattttttccgttatggcgttaaagcagacatcaacgacacctttagtgtgggtgtgctgtacgatgagccatttggtgcagcaattaagtatgatggtaatagtaattttgtggcagataaaaatgcaacagcaacaatttttgcccaagctatcaatcaggctacaaaagcacaattaaacgatagccttgcttataaatcaattaagccagttttagacagtgttaaatcacctcagcgtgctttggcagtagcatcaatcgtagaaaccaattcagcacaagccaaacccattgctgaccgattaagagcagcggctgcacatgcagaagcaactgacggtcaaaagactaatgtcgaaattcgcaccaacaacctaaccatgttagtcggtgccaaattgggtgctaataaaaatttccaaatctatggcggtcctgtggctcaaagagttaagggcgaagtgcatttgcgtggtcctgcttatcaagtcatgacaggttatgatgccaaaattgcaacagatactcaattgggctgggcggcaggtttggcattttataaacccgaaattgccctaaaagccgctttgacctatcgctctgagattgagcatgactctgaaattgccgaaaccattcctgtgacgggctatgcgggtaaaaaggattttaaagttactttgcctgactcatggaacttagattttcaaactggtgtgaatccaacaacgctattaactgccaaagtacgctatgtaccatggtctgattttgacattcgcccaacacagtatacagaaaccacaaaacttcgttatccacagggtttaccaatcatcagctatgacaaagaccaatggtcggctgaagttggtttgggtaagcgtgttagcgatcgtttggctgtttcaggtgcggtaggttgggatagtggtgcaggtaaccctgcaagtagcttaggtcctatcaaaggctattattcattgggcttaggtgcgcgttataatgttacacctgaatggtcgctgtctttgggtggtaaatactttaaatttggagatgctcaagcacagctaccaaccaaagataaagtaggtaactttgatagtaatgatggctatgccttgggcgttaagcttgcttatcacgccaaataatctcatgctaaatcatacaaaaatgtcctaaatataaaaaatagcttgaattttcaagctatttttattagttggttaaaaaattaacgaatctcaaccgtcgcaccattttcgatgacagcgaccaattctagcacatcccaattggtcaggcgaatgcagcccagcgacgattgacgactaatgccctctggtatgggcgaaccatgaataccatagctgggtttatttaatcccatccaaaccacaccgacaggactgtttggtcctggtggtaaataatagactttgttgtcttcatcatcacgattgacggtggccttataagttggcattttaactttattgatgattttgtacttaccgcctggtgttgtacttgcctcaccgccaaccgttgttgggtaagtggcgacaagctggtcttcatgataagcatataaaatcttatctttacgatcagcaaccacacgagtaacaacgccttcaaatggcttgccagtattaataaccgtaatgctttcgccagcaacaaagcgtttatttgggttgagtttttttaggtatgccacatccatatgaaacctttcaccaagcatctcttgaatactttcatagcctaaagcttttaactttgaacgagattctgcatcattgggtagggttttataaggacctttagcatcagcttcggtaatggtataactgaccaaaacaggttgattggtcgcaatattttggtttaacgcatcccaagtagcttggttcattttacccgttggctcaagccccttgattttttgaaaattcattaatgctttttttgaattcatgccccaaccaccatcaatagggccaggggaggcgtgattccagtcaagcaatacttgcatttttacggtcatggcagtattgactttcatgtcttgtgtccatagcgactcattgacacgacgagcgtattcgtccaaattgtgtattgttgtacgcttacccccttgctcgatactgttaatgacagtatcatcggtttgggttgggacgatgacctcgcctgagataatatcgccatcagtattggcatgggcaatgccgatgcttagtaagcttatcattactaagcttaaaggcttaattaatgtcataataaatcctaaaaaaaatatacgctattatatcacgaccaaaaactcaccacaattttaaacatgatggataatcagggttaaaatttctaagccaaatgattgattgattttaaggctgtcattcgctgacataagtcagcattgtatctgcttttatacagatatacccccaagttttgtcgttgtcatcaagacatggcatgatatttagaatttaaatttatgaacttaaattaattttatctttaagaagaaattccatcagtgctttttgggtgtgcagtcggttttcggcttcatcccaaaccacagagcgtgggtcgttcaacagatcaaagctgatttcttcgccacgatgggcaggcaagcagtgcatgaacaaaacatcaggatcagccttatcaagcatggcagggctaacctgataaggagcaaatcggcgtgcacgcgtcatttgttcagattcttgacccatactcgcccatacatcagttgtaatcagatgtgcccctttggcagcctcttgagggtcttcaacataagtgacgcagtggctatactcttcgatgagcttaggattcggctcaaatccatatggtgctgtcacacgcaactgaaagccgaattgatgagctgccaaaatataagaggcacacatattattaccatcaccgacccaagtgacagttttgcctttgatgctgcctcgatgttcatgaaaggtctgcatatcagcaagcaactggcacggatgaaaatcatcagtcaacgcattaatcacaggtacagacgaatgcttgcaaaataaatccagcttgtcatgctcaaaagtgcgaatcatgatgatatcaaccatacttgaaatcaccttggcggagtcttcgataggctcgcctcgaccaagctgtgtatcttttggcgataaaaagatggcatgaccaccaaattgacccataccagcctcaaaagagatgcgtgtgcgagttgaggatttttcaaaaatcatgccaagcgtacgccccacaaacggacgataaatctcgccacactgctgcatttgacgcagcttgcttgcacgactgatgatagcctcaagctcggcaggcgtcatatctaaaagattacgaaaatggcgtacgctcatgataaaatattcctttaacaatcagggcaaatttgtagtatagcatggatatggggcttggctatcatttaacgataatttgttttttaagtgatatgggttgttatgtttaagaaatttgccaaatgatcgtaactcactgaaaattaattatttattttgatttggcaaatattttatgtaaacaagcgtatatttttacaactcgttacatttatttgtgataaaattattgagattcaaaatttaccaaaaggatatgccatgggttttatccatgctaagccaatgatgactaggagtaatttatgggaatttatttaacggcaaccggtctttataaacctgcttatcaaattagcaatgatgagttggtggctgcatttaatacttatgttgataattataatgccgaacacgctaaggcaatcgcagcaggtgataaggtggcccttcagcactcatcaagcgaattcatcgaaaaggcatctggtatcaaatctcgttatgtgattgataaaaaaggaattttagatcccaaaatcatggcgcctatttttcctgctcgcaaacttggcgaggagttgtcagtgatggcagagatgggtttagcagcactcaaagatgctttggatcgtgccaagctgacggctgatgacctagatggtattatttgtgcatcatcaaatttccagcgttgctatcctgccatcgccatcgagattcaacatgccatcggtatgcagcatggctttgcttatgatatgaatgtggcttgtagtgcggcgacttttggcattgcccaagcggtaggcagcatcaaagcagggcttggcaaaaaaatcgctgtgctaaatgttgaaattacctcagcgcatcttaattggcgtaatcgtgatagccactttatttttggtgatgtggcggctgcgacgattgttgaggagttgtcaaccccaaaaggttatgaaattcttgacagtaagctatacacacaattttctgccaatattaaaaatgagtacggttttatggatcgtagcgagtttttggcagcagatacacaaatgtatgcagacatcaaagagccagttactgataagcttttcttacaagaagggcgtaaggtattccgtgaagtttgccccaaagtttcagaaatcattaccatacatttgaccgaaaataacttatcagccgatcaaattaagcgtatgtggctacatcaagccaatattaatatgattgatttgattttgcgtacggtcgttggaaaagatgcggataaatccattgcacctgttgtcattgcagaatatggcaataccagttcagcaagccctgtggtagcgttccatgagactcaagacggtgttgaaagcgaagatctatgcgtaatgtgttcttttggtgctggttattcaattggatcggtattactcaaaacagtataaaattataattaattattcagttaagatatattaattaacaagaccaatcaaaagcgtctatttaatcagatgcttttgaactttatccataaattcagtccaaacctacaaaacctatcaatggcaattaactcacctacaaaggcaatgccttacgatagtcgcttcaggtagctgagtggtttggtgattaccagcacaaactataattaagttttactaatatactattttgttaaaagatttgttgcttcgtcaatcaagcaatcaaaaaacatttgtacagacaaaaggcatggcgatcatgtcttttttattttgggcttttggtttacaatagctcgatgataagaatctattttaattgagtaatttatgaaaatttatttggcaagaaaccaagtgcaggcaggaccgtatacactcgaagagcttaataccatgttagcatctggtgaggtacggcttgatgatttgatttggcactcaccaatgaccacttggcaacgcttgggcgacttaacccaaaatcaatcctattatcagcccaatagtacgctaccacctaaaccagcaactttggctgagattcagcacaaaaccaaaacaagaggatttggtgataatgtagattttcactctgatcgcacccaatctaccgataaacctaagcgtatcagtgtagatgagctgtatggtaaaaaacccgttcagccgtctgatgatacaaatgatcagtcgtccagtcgaacatctgatgtggcgattagtcagaatacgcaggcagttttggcaaccattggttcaagatttatggcggtgatgattaactttgtgctatttatgttggcactgatgccttttttacagcagtttatggcactaaaccctgatccagttctactaaatacaggcgattttgagacacgcatggcttatgcccaagaattggcaacgcagatacctgcacaaacgatgacactatcaagcattttgattgctgcctatttaatcattcagcttatcttaattatagtccgagcacagtcatttggtaaactggtcgcaggcattcgtactgtagatacaaaaactttagaaaaaccaaattttttcaagcgatttgtcttgcgtgttgtcgtgctattttttatctatcagttggcaagtgctctgccaatcgccattaatatggcgctgattttattgatgattaattatatcatggcagcacgcagcccaattaaacaaggttggcatgacaaattggcaggtactattgttgtgaaggcatctgaggtaaaatttaagaaaaaatcagataagtgagaaaatcatgacgccagaacaacaagccattcttgagcgagtacagctgcccaatgactggaagcaggcgcttgcacctgccttgattagcgaaaatatggataaattgcgtgattttttaaagatgcaatatcatcaacaaaaaaatatttatcccccaaaaaatcaaatatttaacgcatttcatttaacgccattatctcaagttaaagtggtcattttaggccaagacccctatcatggcataggtcaggccatggggttgtctttttcggtacctaaacttatcccaaaaccgcccagccttcaaaatatcttaaaagagctatcaaatgatttgggcgtgcccatcagtcgtcatggcgatcttagcttttgggctaagcaaggcgtattactgctgaatgccaccttgaccgttgaagcaggtcttgctggcagtcatcaaaaacaaggttgggaggagttcactgatgccgtcattgaagccattaataattataccgaccagacggtttttatattatggggcagctatgcaaaacataaaggtcgatttattgatacatcaaaacacttggtgctaaccgcaagccatccttcacctttggcggcaaatcgtgggggattttttggcactcgaccattttcacgcacaaacgagtatttgcaacgccatggcaaaacaccgatcaattgggctttgcctcaatagttgccaaatatgatagtgccatttcattacattaataattctaatatcagttatgatcagtatcacttttggtcgatgcatgatgttgagatgatgaatcgtgctttggagattgccaaacaaggtgctaagcccggcgaaattcctgtcggtgcagtggttgtatacgagggtaggatcttaggtgaaggctataattgcccaatcactacccaagatccgacagcacacgctgaaattgtggcagtacggcgggcgtgtgagacgctaaataactatcgcctaccaaaaggctgtatactttatgtaacgctagagccttgcacgatgtgctttggtgcgctgattcatgctcgcataagccgtgttgtgtttggtgcatttgaaccgaaagctggcgttgttgtaagtcagctaaaattaccagaacaggtgttttataaccatcacttaagtgtttatggcggacttttggcagataaaagtagtgccttattgagtggtttttttaggcagcgacgccaagaaaaaagagcattaaaaacccaagcctaataatttaacataccttaccatatctatgaaaaaacacaattttatgactgatttacagataaattcagataaaccaatcattatcaccattgatggcccaagcggtgcgggtaaaggtacgctggcttatcggctggcagagcattttggttttgagctattagatagcggtgcgttgtatcgtattgttgggctgatggcttatcaagcaggattacttgataacacccctgatgagcttgccttatctgatttggtgcagtcgcttcatttaagtttttgcccaaacgctaaaacacgagccattgatatttatgttgataaaaagccattgcgtgatgatatccgtaatgaaactgtcggcggctatgcttctattgttgcagcatttccaaaagtacgctcagcactgcttgacttacaaagaaatatcgcagataacaagcttggcttggtggcagatgggcgagatatgggtacggtgatttttcctcatgcccatgcaaaaatttatctcactgcaagcgctcaggctcgtgccaaaaggcgtgttactcaattaactcaagcaggaaaacaggcaaattttgatgatatattggcggatatcatcgcacgagatgagcgagatgaaaatcgatcagttgccccaagtcgtcctgccgatgatgcgttattgattgatagttcagataagtcagccgatttggtttttgaagaagcaatgcagtttatagaacaaaaattatctgaatgatgatatgctgactaaaaataactttattaattaagactttgccatttaagtttgtcatttaagagataaaacataaaaaatactatctattgggattataatctgctataattaacaggtttaatatatttttgggttgtcattaagtttaaaaccagcatttcttaatgactatacatcacttgaaccgtactgtgctggacaggctacggctaatttttaaggtaaatataatggtatcatttgctgaactgtttgaagcaagccaatcagaacaaggtcttaacattgagcgtggctcagtgatttcaggaacagtcgttgctattgacagcgattggattacagttgatacaggtcttaaatctgaaggtatcgttgctcgtgaagagttcttaaacgaagctggtgagcttgaagtggcagtaggcgacagcattgatgttgtagttgaagctgtagataacggcatgggtcaaactgtgctttcacgcgaaaaagcgaagcgtgaagaaagctggcgtgcgcttgaacaactacacgaaaatgatgaaatcgttaaaggcgttatttcatctaaagttaaaggcggtttcactgttgagatcggttcagtgcgtgcattccttccagggtcattggtagatgttcgcccagttcgtgaaacgacacacctagaaggcaaagagcttgaatttaaagtcattaaaattgataaacaacgcaacaatatcgttgtatcacgccgtgctgttatggaagctgaaaattcagcagagcgtgatgagctactagccaagctagaagagggcatggaagtagaaggtatcgttaagaacctaactgattatggtgcatttgttgatttaggcggtattgatggtctattgcacatcaccgatatggcgtggaagcgtatcaagcacccatcagaagcagtggaagtcggtcaagaccttaaagtaaaagttcttaaatttgatcgtgagcgtaaccgtgttagcttgggtctaaaacaattgggtgctgacccatggactgaagttgagcaaacttatccagtgggtaccatcaccaaagcgcgtgtaaccaacctaactgattatggctgctttgctgaaatcgctgaaggtattgaaggtttggtgcatgtctctgaaatggaccatacgaacaaaaatattcacccatcaaaagttgttcaagtgggcgatgaggtgaatgtgatggttcttgagattgatggtgagcgtcgccgtattagccttggtatcaaacaaaccatgccaaatccatgggctgagtttgataaaaaccatgaaaaaggtcaaaaaatcagcggtaccatcaaatcaatcactgactttggtctgtttattggcctagaaggtggtattgatggtttggtacacctgtctgatatttcatggactgagtctggtgaagaagccatccgcaattactcaaaaggtgatactgttgaggcggtcgtattgtctgttgatgcagaagcaaaccgtatcagcctaggcattaagcagctaaactctgatccatttaatgaatacttgctatcaaatgatcgtggtgctatcgttaaaggtacagtaaaagaagtggatgctaaaggtgcggtgattactttggccgatgaagttgaaggttatttgcgtgttgcagatattgctcgtgagcgtaccgaagatgcctctaaagtcttgagcgttggcgatgaagtagaagctaaaattgtcggcgttgaccgtaaatctcgcaatattagcctatcaatcaaggcaaaagatgaagctgatgagcgtcaagccattaaagagctttctaatacagcagctgaaacacagccaaaaacacttggcgatattttcggtgagcagcttaaaggctgattgccctgaatatgattaagcctattaaaaagagcggtgttggtcatcgctctttttattgcagtaaattgattcaatatcatttttgacagtttgaatgtattttaaatgtgtgacgctttaacaaaaaaatcattttcttttttttgtgttttaagttattatttttaagttattttatttcaagttatttgataaaaaagcttgatttgtgattgaggtaggtcgtatgcaagcggtaataaataaatctaatttgattgcaaatttggcatcagtctgtgaagagttagaagaagatgttgttgatgaagcagtacgcctaatgattgcgatgatggttaatgagttggtgtatgatgggcgtattgaagttagaggttttggtagcttttgtttacatcaccgttctgcacgcattgctcgtaacccacgcacaggcgagagtgtctctgttaaggccaaagccactccttactttaagcctggtaaggcactgcgtgaatcagtaaatttggttaatgactgactaaacaaagggttaattatgcatattattttaatcatcctattggtgctggcatttgcttattctttggcacttgtcgttctcaataatcaagcaatcgctgttaatttattattttcaagtgttgcaaatatgagcttgggtttagttttagttgcaacaatttttttaggcattttgattgggattttgcttgcactgttattatttcgtgtttttcaaaataaatgggaaatcagtcgtctcaaaaaagaaaaagcatccattcaagccaagcttggtgaagctaatcttcaactggtacaacaggctgaagaaattcgcagattagaacttgagtatcagacaaataagccaaccttggctgatgctactgtacaaaaagttaccaatgatggctatcatcatccaaatttataactcaatgcctgatgaatgatggctgttgttctcaattgcgaacgccattaaaatatgctatgattgccgtcataattcaataaaaagccaccatctacggctttttatgattggtcacaaggatattttatggcaattacctcacccatcattgtagctgttgataagcataatttaaacgacgcactatctttggcggacagcttagacccagcactgtgtcgcctaaaagtgggtaaagagttatttactgtatgtggtatccaaatcattcaggcatttcatgagcgtggctttgaagtctttttagatttaaaattccacgatatcccaaataccacagcacaagcagtactttcggcagctgatatgggtgtatggatgaccaatatccatgccatggttggcactgatacgatgcgtttgtgtaagagccgcttacaagatgggggctatgatacattgttgattgcggtcactgtgctaacttctatgacacaagctaatttatccgagcttggtattcagcgttcggtgagtgagcaggtacgccatttggcaggattgactcatgattcaggattagacggcgttgtttgctcagctcaagaagcacagcttctgaaacaaaaatttggcaaacagtttagactaattacgcccggcattcgcttggtcgaggatgctaaagatgatcaagctcgcatttgcacaccagctcaagcactacaaaatggctcggattatttggtcatagggcgttcaattacaaatgcatccaatcctaatgataagcttcatacaatcttagctggtatttgattttactaacatgattaagccctgttaccaaacagggcttaatttatggtaatgaataagtctttttattgatagcgtgttggatcggcaatcttagcatccataaatccttgtctacgcagatggcagctgtcgcagtgaccacacgcacggcccaacgcatcggcttgatagcatgaaacggtcattgagtagtccacacccaatgagataccaagcgttaaggtatcggcttttgataaattttgtaatggtgcaataatggataggtggttgccttgcctacctgaaacggtagcaaggtttgccatagtttcaaaggcagcgatatagtcagggcgacagtcaggatatcctgaataatctaccgaacttacgccaatgatgatggcggatgcttgcgtcacttcagcaactgccaacgcataagataaaaagatggtgttgcgtgcaggtacataagtaatcggtgcgacctgatcagcatcgctgtaggtgacagactcatcgtgatttggcaccgatagattcatatcggtcaatgccgagccaccaagttttgcgatatcaatatcaatgacatgatgtctaacactaagctttttggcgatattttgagcggcatgaagttcacttgaatggcgttggccatagcaaaagctgaccgcagtgacagttttaaattgtgattttgcccagtacaggcaggtggtcgaatccaaaccgcctgaaaataatacaacggcattttggttattattcatatgacatttcattggataaagtttcaagaaagatactccaaattatgacatatttcaactattttttaggtaaattcctttcattaatacaaacactgccaaagcatgataaaataagtagccataatcgatataaatttgctgtaccgaggaatgaatggaagttgagattatcaaaattattctagcctttatcgtgctgattaacccatcggcagctttggcaatgttcgttaattttacgcatggatacagttatgaggataaacgccgtgttgcacggattgccagtgcaacagtgtttattgcgattgcatttttttcattatttggtgagatcatgttgcgtggtttgggcatctcgttggggtcgtttcgagttgcaggcggtatcttgctatttttgattgcacttggcatgatgaatgatggtaataatcctgtcaaacccaatgaagatgagctggaattatcccagcccaaggcaaaagatccaagctctttgactggcattgccgtggtgcctctggcgataccaatgatggttgggcctggcggtatttccactgtcattatctactcatctcaagtaagtggtattgtgggaatgtcgctcatcattgttgcaggtttatgcatcagtattttatgctatttgtctttaatggcagcagggcggattagtaaattgcttggcgatactggcttaaatatcatcaatcgtattatggggattattttagcagctgtggcgatagaaatcgttgtggcaggtctaagaaccatttttccaaatttattataatcagcccaaataattaaaaccaaaaatatctttaatcttcttcttggatgggcgtgtttagccgatcacggtttggcgatagtttcgccaatagcttagatgacatgggcaaaatgcccccatccatcagatcagccaatatttcggcacaaaaaggggcaaagctaaagcctttagatcccatgccgtacagacaaaaaatatggtcactatcggaaagtttgccgaccaaagggtgataatctagcgtttgggcacgaatcccaacacgaccttcaaaatgagtatctttagagatatttaaagactggcaatagttgggcaaagcttggctaaatttttgaaagttactaagatgctcatcatcgcttagctttgtttctgtattattgcgaataaagcttgcgccaaatagtaaggattttgattggctcttagagtcaaaaaactcggtgctataaccgtcgtatttgatggcgttggtcgcttgagttggcttttttggatcatcgccgttggtaagagcaagccaagtaacttgaccacgaatttttcggcaattaaacagccgattatcaatgagatggctggcaaatcctgcagcgatcacgacttgatcaaagctgaaattttgatgactttgcccatcaaaagctgtcaataccaccctattttcttgctcttgaaagcgtacgaccttaaaagggtgatgtataaaatgcttttttagtaacttggcaatgttaatcgggtataaaataccgcccatgggaatgtgtgcaacgatatctgtttgtcgcagatcttggccaagtgcagaactgtctttttgtggatagtgggtactgattaacgactttggatattcatcaatcagtgcttgtctttttttggcagttttttgactgggtaataaaaaatcaagaacgccaatctgatcaaatatttgtgagtacaaattcattgctttataatggcgatatgaatacaaaaaactgaccgtaggcaggtgattggtggcatgatccagcaaggttagtttgggtgaaaataatgcacacggattacctgacgcacctgccataatatcatcaggctcaaacaaatgcaccacatgcccacggtggctcaaggcagcggcggtgcttacgccgctgataccgccgccgataattgcgatctttttgggcttaaaacctatctgataatggtttaaggtaggctgatttggcattggtgctgtgcatagcatttgtctttttcgcccaaagcctgctgacttaaccatgtcaaaccctgcatcaatcaagccacggcgtacaaatcctgccgcagtaaaggttgcaactgtcgtcttgcgatgtgaaagctgtgccatcgccttaaataatgcatcactccacatatctggattcttggcaggggtaaaaccatccaagaaccaagcatcaatgcgtatgctatgctcatgttgattattggcaatttcattaagggtatctaaagcctcaccaaaccataaatccaaagtaatcttttcgctcagatgcagtcgatggcatcctgccaaaggcagtggataaacctgaatcaacgcatctacccaatcgccaaaactgtcgtcagtacgccatgcagataatgcttgtgcaaaatcatcatgaccaagcggatatttttcggtactaataaagtgtaatcgagtagattttggggctattttttgccaaagctggcaaactgccaaaaagtttaatcctgtaccaaatccagtttcggcaatcacaaaacgctcgtttttggttaactgaccaaatcgttcggttaaccgattaccatgaataaacacatggtaagtctcgcttaaaccgccagcttgtgaaaaatagatatcatcaaaatgccgtgatgtggggataagacaaccattgtgatcttctttccatacgatatcagcggtttttagcgtgtctgtcatgagttgcctcatactacttaggaagaacttggataaaaggcctaacatcgacatgatgatacacgcctgcgatgatataaggatctgcttctgcccaagctttggcggcatgaatatcctcaaattcagccaccaccacgctaccactcatggcagactctccatgtgcgatcggcgtgggaccagcaagaatgagccgattgtgcgccatcagcgtatttaagcgttcaagatgtgcaggtctggctttggtacgttgatctaggctgtcagcgacatcgtgaccaataatgacaaataacggcatgttttctccttggacgaatcagtgattaaatatggggatacggcgttcatttagcgccactttccaagcatcatcgtgtatctgctcaccaacaagcatcgctataatgccaaattgatggctagctaatcgttctactttacgcactatgccacgatcaggtacggtatcggtattgataattaaataaatttgtgccgataagtgcaaagcgtctgcaagtagcatctttatttgtgcgtgtgtatcaatcacgccaaaatcttttatggcattgattggaattggatgatgatagtaaggcttttcaagtgcagcaataactaatcgatcgcttaatacaataggtgcaatcgttgtaggcttaggcgactgatagtcatctgcattaatgatggtttgacgataaaaattcatcaaattggcataatagggtgctttggtatcaatacgaaactgttggcgtgctttgatacgactatataaatatgctgccaaacgaggcaaaatcgcatagatgataacgcttgtcatcgccaatatggcaaattgtgcaggtgtctgacttgacgcactgggcaacacaatccccaactgactgggaatatagccgatgatcgttatcaaacgatcaaaatgatgatcggtcagcagtgtcgattcccagtgaaaactgtagcttttgaataaaaataagcccagcatacccaaaatgctacccattaagccaaatagccaagcgccgtgtaagatactggcaatctgccatcgcttgatgggtttgattgtatcatttaagacgctaaaacaaactttttggatgtttttatcacaagcacttagcttctcaatcagcttatttttaagggcgatatgttccacgacgctgctaagcatcgatgggcggtgcaaaaatgcaagtgatatcagccaccaaaccaaagaaagcgtatgccaacctaataacgctaccatcaaataaaaaaagttaatcgcttgagtgccaagcagacttgcaacgccaatgagagcgaagataaaataaagcagataaatcagtctgatgacacttaagataccatgctgtgtgtctgataatatctgcataatgcgtgcatcgctgtcaattttttgagctcggataaatagcttatcaaatgctgtgccattttccaacttaacagcctcggtgatgatttttggatcttgggtaaaaatataattttgagcttcaagccgtctgattacttctaaatgctgatgtgcttttttagtcttggttgtcatgttgcactctcatgagcgtcagggctgtagttcactaagcttagcatttagcttgtcaagcttattttgtaggtctgcatcagctttgagtgttaattgtttattaagttttttaatttgggtacgcagcttggccgcagcaattgcatttttggcatggatttcatcaatttcagtattttggcgttggttaagtacattcaccatggcagattcaatggtactcacaaccggctttgtgccttgttcgatggtcatggcaactcggtcaagatgctgatgataacggcgacgcagatgattttgttctgtgattctgtcagcatcacttaattgacgcaagtgcggtatgacatcaatacaatctacagggcagggggctaagcatagctcacagccagtacacagatcggtaatgatgctgtgcatatgtttggcggtaccgacgatggcatcaacagggcaggcgggtatgcacttggtgcaaccaatacagtccgcttcttggatgatggcccgtacttctttgggtcggttggttagtggatcgatttgccattggcttggggtagcaggcttggtaggcttgtttagtatatttgcaatagtatcggttacggattgaccgcctggtacacataaattaattgcttcaccgtgcatgacaatgccataagcataaggcaggcagccatcatgatgaccgcataagccgcattgagtttgcggtaaagcagcatcaatagcggcaatgctctgacgatcagcattgcttaagctttgtaagtttaatggctgaaataagatgggtaaattgtctaagcgttctgtcgtgtatgtaatcatgatatcttattagttaggcagtgaccaccgcttgaatcagtgagcatgcgatggtaccttgatttggaatgggtggcagctgatcaatatcaaaaaattgggcatcgacaagttcattacgctgaatgttgatttgaccttctttataattggcgataaagccaaccatcagattacttggatggggccaaggctgactatcaaaatatcgaatatcatcaatcaatagtcccacttcttcatatacttcacgatgaactgccatggacagcgtttcaccaacttcaacaaagcctgcaatcaagccataaatgccacttttatggtggtgatgacgcgccaaaagaatttgttgtttatgggttttgggatgaatgcgagtgatggcaacaataatacaaggctgtaccctagggtaggcatgatgacgacattttgggcaaattttagcatgttctccttgggggtggtgtgtcgtcttagcaccacagcgactacaaaactgatggtcattgtgccaaccaatcagcatgattgcacgagccatcaagtttagcatcttattatccatcacagtcaaaaattcacgaaaactgactatttttagatttctgactgttttggtgtcatagccgtcaccataagcaaaaatcaacccaagcttgatggcatcattgatatccatggcatgactaatcggcaactgatttggtgaacacaaaagtaaagactgcttattatgcgtttcggcaaaacccaaatgaatggctttggttggtacattggacaacttaagcacaaatggcaaaccatcgcttgtacataaaataccatcgccttgtacgatccaaatgttcgctgtcatgataacaccttggcacgccatagagcatcagcctcaatgtcagactcagaaagtgccagtgagtctgcatattgagataaatcgtaaaatgcagatcctgtactacgagtattgctgccaccagtgttatcatcgtcaattgccattgcgatttgaccgcctgtcatcgccaaatacacctcagctaagatctccgagtcaagcaacgccccatgaaaggtacgatctttttgaccgacgccaagccgttttactagagcatccaagctgtttttttgaccagggtacatttgtttggcgagtgctagtgtatcggtaactttaacactgtttgcaaaattacttaaacctgcacggttaaattccatgtttaaaaatttcatatcaaaggcggcattgtgcgcaatgacctcactgcctgccataaactcataaatctgctgagcaacttcagcaaatttgggcttatctgcgacaaacgcattactgatgccatgaacttgtatgactgcatcatccatgtgtttttcaggattgatgtacacatgtaaaatattgcctgtgaatttacgcccaaccaattcaacaattccgacctcaacgatacgatcaccaccagcttcattaaaacctgtggtttcagtatccatgatcagctgtctttcgggtgcgtctcgattgtcaggcttgggtaaaattggccaaaaatcagtattggtacgactggtatcaccatcataatcagggttttggatggtgttgtaagcataggggtgttttggtttgggtgtatttatcataaaattttcgtcattgtgaacgatgggattggggagggtctcatctccaaaaccatcaacgcctttattggccagttggtctgccatctcattgccagcatgaccagcatggcctttgatccattgccaatcaatgatgcgattttgggtcagctgatccaatcgttgccataggtcttgatttaagacaggcttgccatctgcttttttccaaccacgcaacttccaaccgccaatccactgagttatgccatctttaacatagcctgaatctgtccaaagttgcagaggaatctgtgcaggcgttgcctccaaagctgtgatggcagccatcaattccatgcgattattggtcgtatcaggctcaccgccccacagatgccgctcatcgccattgaaataatgcaaatacacgccccaaccgcctgcagatacgccttgttttccattgcctttacaggcgccgtcggtataagcgatattaagttggctcatggtgtttgctcgtatgattgatagtaattagactattataaatcattgaaggattttgtgcgaattttttggtctatgcagagactttgagtgtgatataatgctttatttgccgaaaattagattgtttatgattcatcatgacacaccaagccatcgttttgaccgtttatttgacgccaaatttttacatgcaccaaaaactgtccaagaccaagacagacaaaacatttttcaatcactgaccgcaaacacaccactttttttggaaattggtgcaggtaagggcaagcatgccatgcaatttgctggcttaaatgcagacaagtatttgatcgccattgaaagaactcgtgaaaaatttaacgcatttcaaaaacaagccgctcttggtgaattgaataatttaaccttcgttcatgctgatgccattaccttttgtgtacattttattgcacccaattcgcttgacggcgtatttattttgtatccaaatcctgaaccgcataataaaaatcagcgctggcttaatatgccattttttgaatttttattatctcgtctaaaagctgggggatttgtcaggattgccagtaatattgagtcttatattgatgaggcgtgccagctgttggacgaagtttggcgactgccttataccaagtatgccattgattcaacatcagcacgcacgcactttgagatcaaatatttggctcgtggcgagctttgtcaagaaattattctcaccaaacctgcctgctatcagaccagatttgatgatacgcctgtaaaagagtaggctgtatgaaaccaaaaattgctgtgattggtgcgggtgctgctggacttatggcggctgaagtgttgtctttataccctgtatcggtagatgtctatgaacacaaaccaactgccgcacgcaaaatactgatggcaggcaagactggtttaaatatctcgcacagtgagccttttgagacttttgtggatcgttacacgccaaatgattggctgaccgggtatttacagtcatttcatgccgatcatatcgttgcgtggatggcatctttgggtatcgaaagctacattggttcatctggcaggatttttccagtagaaatgaaagcctcaaaactggttcgtgcttggctatctcggctaaatggtcggggcgttcggttttattatcgccatcgctgtactcagatatcaggcagggtattaagctttgataaacttgatgctaaggcggagcttattgactctttttgtgctaactatgatgcggttatcttagcgtgtggcggtgggtcataccgagcacttggcagtgatggtgcttggcagcagtggtttgataaagatttattaacacctttatatgccagtaatgtcggcgtgctggttgattggtcgtcttttatggtgccgttatttggtcagccattaaagcgtattcaaatcagtgtagggaaaaagtcgtatcaaggggatgtcatcatcagccattatggactagaaagcggactgatttatcgtctcaatcgggcaatgcgttgctgtcaaaaagaaaatggctttcatttatcggtcgatctgatgcctgataaatctgttgataccattcatcatattttaagccaaactaaaagaaaatcgctgaataccttactcaaaaaagctggtctagatgctgttaaaatctctatcttaagggagtgtacgcctaaggcagattggtcggataccgccaaaatggcagtgcatatcaaaaacttaaccattcaagcgacaggttttcgaccaatagatgaagcgatcagtactggcggcggcatcaaacgcattgctctaggcaatgatctacagcttatcaaagagtcaggtgtattttgtgctggcgagatgcttgattgggacgcaccaacaggcggctatttattaaccgcttgtatggcaacagggcgtgcggcagcttatggtgctttacagtttttaaatattgaccagtaaaaaagtgattaaaacaaaatcatcaagccaaattgtgctggtattttattcatttattttaagattaattaatgagttaattaataaattttttaaccagtgcgtcactgtcggtgcgtgcattcagtgccaccaataaggcataagcaccaataaatttacgactgataaacatcatttctttgggtggtaggctaaattcacgcgactgcataccatttttggcggcattcattactctggcatataaatcgctacctgaccaaatatataagccttgctcatctaaatgtgaagaatgaccgccatggcgtgtcttaagtgcctgcgcatgagcaaaaggctcgcaagccatcaaaaatacttctgctatatcagatttgggtttaccgtttaactgatcaaaaaaagcatagcctgtcatggctgccatcatctgttgtttgtcttgatgatagcctgcactaatcagcccatacgcgatactcaaaagatgatcgtcaaattgcttgattgccccaaagtctaataagataagcttatcaatgccatcttcatagcgtaccaaataattgccaaagtttggatcggtctgcatctcgccccattcaaataactcacgcatgaaaatttcgatggcggcttgtccaagtgcatttttacggtcttggggtagggtggtgatgattggatcatttaacgaaatacccgcttcaaagctcatgcaaatcaatcggttagtactataattatcataaattgtcggcacaatataacgctcatcatctgccaaataatgagcaaaacgcttggtggtttctgcctcaagccgataatccacttcacggtgcaaaagctcaccgatctcctcaaaccaagcatccaatgctttggtctgtggtactgcattggtaatttttaataaatgcttaaagatagataaatcagaatcaattgaatcggcaacccctggatattgtactttaagtacaacatcttgaccgctgtatttatgtacagctttatgaacctgtgctaagcttgccgtacctatgggtgtgcggtcgatatcaaagtcagcgatttgctcaccaagttctgctttaagtgtcgcataaatgacatgccaagacagcggcgtcgtttgagcatccagtgtatgcaaggcatttaagactgccttgggtagaaaatgctcgccatatagtgcaagcatttgaccgactttgacgaccgaaccctttaatttaccaagctcaccgaccaaataatccgcttgctcttgcattaaagtatgcttgacaatctctcgctcttctttggtcattaaaagaccactcatgctggactttgcccaatttttaccgatatttaaagaagtttttgcaatcgatagacggcgtgaaaaaggcgaagttttgagtttattaattggttggctcattgttgtgatgcaataaataatatggttattaatggttgcattatagcaaatttctattcatttaacatctgtcaaacctaaaagatatttgacaaaattaaaaaagatggttaaaccatcttttttgttgattaaatcagcgtttgatggcacgccagccgatatcacggcgatattgcatgccatcaaaataaatactctcaatggcagccaaggcatctttttgggcggtttgaatatcatctgccagtgctgtgacgcataaaacccgcccaccatcagtcacgatggcatcacctgattgtttggtgccagcatggaagatttttaagcggttcgtttgggtatcaagtcctgtaatgatatcgcctttgctgctggattcaggatagccacgacttgccaaaaccacacccaaagccacttgatccgaccacttagcttcacttggtaaattccccaaaagacctgcttggattaggcgagtcaaagagcttttaagacgcatcataatcggctgagtctctggatcaccaaatcggcaattaaactcaatcacataagggtcgctatgctcgtcgatcatcagccctgcatacaaaaatcctgtataaggcgtgccattggccttcatcgcctcaacaacagggcgaattacccgctcaataactttatcatgcaccatctgtgtgacgacaggtgctggtgagtatgcacccataccacctgtattagcaccagtatcaccctcaaaaatacgcttatgatcttggctggttgccatcggtaggatattttcaccatcaatcatacaaataaatgatgcttcttcacccgataaaaattgctcaataaccacacggctgcctgcatcaccaaatttgttgccatcaagcatatcatcaattgcatcaaaagccgtcgcttcatccatggcgacgatcacgcctttacctgctgccaaaccatctgccttgatgacgataggcacacctttttcacgcacataacgcttggcggcttcaatttctgtaaagacttggtaatacgctgtgggaatgccatgtttttgcataaattctttggcgaatgcttttgagccttcaagctgagcacagtatttcgttggaccccaaacagcaatgcctgcttgacgcaaatcatccaccacaccagcaaccagcggcgcttcaggcccaacaacgacaaattgaatgtcatgtgattggcaaaattcgatcaatgcgttatggtcggcaatgtccaaatcaacattttgtaattttggctcaatagcagtaccagcattaccacgcgcaacatagacaatcttaactgcatcatcttttgcacaagcccatgccaatgcatgctcacgacctcctgtgccgagtaccaaaatattcatcattcccccaagtatttgtttaacattggtgtttattgtaacaaaaatttggaagatctgccaatgaagttctaaaaaaatcgtcagttattttggcgtgtgatctttagataatatgaatggtgtaagattctgtatcaagcttggcgacgagcgtatcgccactgacaagcctgccaacacctttgggcgtgcctgtataaatgatgtcgccttgacgcaagccaaatttttcatgcaaaaaattcaattgataagtcatatcaaataatagcttatcggtactatcgtcttgacggatatcaccattgaccatcagtgataattgatgcgttgttggtatgcctttggttaagacagacagccaagcagcatgacgaaagcctttggcagttgtccacggcatgcctttggcttttagggaattttggatatctcgtgctgttaaatcaagcccaatcccatatcctgcaatacagcttagatcagggatttggtcgtctgccacatcttgattgatataaacaaccagctcaacttcatgatggatatcttctgaatagcttggtaagcttagagtgttgtcggtggtcaacgctgtggttggctttaaaaataccaaaggttcgcctgtgggtgtattgccaagctcgctgatatgctcagcatagctacgaccaatgcaataaatattattgacaggggcggtgctgccatctttaaatgtgatgtgcttcataaaaatcctcaaagcttttgtcagcagttttacaaaatgatggtgcaatcacaccatcaagtgttaagcttggcagtgttcactaattagccccgtcagataagggtagtaatagtttggtaagtcatgccccatgccatcgaccaacacaaaacgagcatttggaatgactttggcaagaaatttaccatggcttggtgcgaccaaaccatctttattgccatgaataaccaaagtattagcacggatctgcttggtgaagcgtaatatcgaacctgatgccaaaatagcagtcagctgctgcgagacgcctaatggatgaaaatttctttggtagcgtttttcggcaatggcgcgcgtacctttgatgtctaaatgtccaggtgatccaaccgctgtcataaaccacacactatggcgaaccatatctctttctgaatgactttcagggcggcggacaaatgtcatgaactgcttggggtttggtggtcttaaaaatgcccgattggatgtagaaaatagcagtactaaatttttgatatatttgggataacgcgctgcgacgatttgtgcgatcataccacccatcgaagccccaacaagattgacattatgaagctgcatggttttgattaggcgtgctgcatcttctgccatatccgttagggtataggcaactggctctgagcgattggatagacctgcctgcatttttagcatcattttgaaggtattgagtcttggtagaccatcaatttggattttacttgataagcctgtatcacgattatcaaagcgtatgacaaaaaatccagcatcaataaatcgctttaaaaactggtctgaccaaaacatcatttgtgagccaagacctgtaataaagatcattggtggatgctcggggttgccgcctgcttccacacaaagcttaataccttcaccgatatcaatgatagcctgaaatagatattctgacagatcagaaggataccagtgaatatctccaaatttttgccagctgttaggtggtgtgatggggcgattgatactcatgatggcttaaatttccaccatttcaaaatcttctttaccaacaccacattcagggcaaagccaatcatcaggcacatcctcccagcgtgtgccaggtgcaagcccttcttcggggcaacctagtgcctcatcataaatccagccacatacaatacattgatattttttcataatcacctttgaccgtcaaaagttcaccaaattcccaaagatttggttattgggtaaataaaatacccaattagtttacagatgtatcgaatttttgcaagtaaaatttatgatttatgaaaattatttgatcaaattgccaattttttgttgattaaattagcacaattgacggtattcggctagaaattttggtgtattatctaaatgtcatctaaaaattatttgatattacagataaaataaagtttgataaaatcgctacaactcatcgttaaaatcgtgtatcattaaccatattttaatgcgtataaggaatgctgtcatgagccaaactacccagtctttgcctgttaataccgatgaaatcaaaggctatcgcacccaaattgatgccattgatgagaaaattcaaacgctcatcaatgagcgtgccaaagttgctcagcaagtggcagttgccaaaaaaaaccacgaaaatcaccccatcttttatcgccctgagcgagaagctcaagtattaaaatcagtcatggcgcgtaatgaaggcccgttatctggcgaaaagatggcacgcttgtttcgtgaaattatgtcggtgtgccttgagcttgaagagccacaaaaagtggcttttttgggaccagttgggacattcacccatgcagcagcactaaagcattttggtaaagctgccacgacagtatctttgacaaccatcaccgatgtatttcgtgaagttgaagcgggcagtgcaatgtatggcgtggtgcctgttgaaaactcatcagaaggtgtggtgaatcatactttggatgcatttttaagctcaagtttaaaaatcattggcgaggtggagctgccgattcatcataattttttggtggcagagcatacccgtgttgagagccttagccgtatttatagccatcagcaagcattggcacagtgtcgccactggctggatgtcaatttcccaaatgttgaacgagtggcagtttcatcaaatggtgaggcggctcgtcgccttcaaaatgaatggcattctgcagcaattgcaggcgatgtggctgttgctgaatatggtttacataaattatacgaaaatatcgaggacaatccaggcaataccacacgatttttaatcattgggcgagaagacattgcaccatctggtcaagacaaaacctcaatcgtggtctcaagtccagataaagcgggggcattgattgagattttggaacctttacgctgtcatggggtatcaatgaccagcattgagacacgccctgagcgtccgaataaatgggcttatgtattttttattgatatgaatggccatatcgaagataagcatgttgctgctgcgatcgaagatatcagactgctcgtcaaggatttgcgagtgttgggctcttatccaaaagctgttttatgacttttttaaattaacagcgtatgaaaaatccaatggataatacaaaaaagccgttgtttgagcaattgtgcgtcatcggcttggggctgattggtgcatcatttgtacaagcggtacacaatgccaaccagcggcttaacacgcctttggtgggtcaaatcactgccgctgataccaatcaaaaaagtatcgatgatgcgttggcggcaggcgtgatttcaagtggtagcacagatattttaagtgcagtttgtggttctgatttggttatgattgccacgcctgtcaaaagcatttatccgatcatgaagatgctaaagcatgcgatagatttgggtgatttagccagtcatgccatcatcacagatgtgggcagtaccaaagtatcagttgctaaagcggctgatgagatttttggtgcgtaccatcattttattggtggtcatccgattgcaggtgcagaaaggtcgggctttgacgccagaaatggtgagctttttgtacagcataaggtcattttatgcccaagcactcacagtcaagcaggcgattttgctaaaattgccaaaatctggcaggtaatcggtgctgaggttatacaaatgagtgcatcacgccatgatgagattttggcttatactagccatttaccacatttgcttgcttttagtttgacacatcagttggcaagccatgatgataatttggatatttttcgttatgcagcgggcgggtttagggattttagtcgcattgccgccagccatcctgtgatgtggcatgatatttttatcgccaacaagcctgcacttttacatgcattagatgaatttgtgaatcatttacaagtgtttcgccaaatcattgatcaagaagattctgaaaaaatgtttgattggctcgccacggctcgtcatgctcgccgtcattttgggcatatgctcgccaaaaaaccgatgcacaaacctaatattgttattactccagatgccatcaaggatactattatgagtcaaagttatcacattcggccacaaaatgccatttcaggtgtgattagcgtaccaggggataagtcgatctcacaccgctcaatcatgtttggctcattggctgatggtgtcactcatgtgacaggatttttgcagggtgaagatgcactggcaacactgcaagcatttgctgatatgggcgttaagattgagcgaaatggcgataaagttaccattcatggcgttggtatcgatggtctaaaagcacccaaaactccgctatatatgggtaattcaggcaccagcatgcgtttattggcaggaattttatctgcccaagcctttgatagcgtgatgacgggtgatgtcagcctatctcagcgtccgatggagcgagtggctgtaccactgcgtaatatgggtgccaaaatccaatcaacgggtaaaaaaggcacagcacccttatccatcacaggctcacaaactctaaatgccatcgaatatcaattgcctgttgcttctgcccaaattaaatcttgtctgattttggcaagtctatgggctaagggtaccacaaccatcatcgagcctgaagtgagccgagatcacaccgagcgtatgctaaatgcctttggttatcctgtgcaagttgatgggtgtaaaatcagtgtgacgggcggcggcaggctgacagctacagatattattgtgccagcagatatctccagtgcagcattttttatggtgctgggtgcaattggaggcggtgagggactgaccattgaaaaagtgggcatgaacccaactcgcacaggcgtcatcgatattttaaccttgatgggtgctgatatcacagtgatgaatgaagctgtcgtgggtggcgagccgattgctgatattacggtgcgaccttctgatttgcatggtattgacataccagagcatttggtaccacttgcgattgatgaatttcctatattattcatcgcagcaagctgtgcgtatggtgtcaccaaactgactggtgcaaaggagctgagagtaaaagagtctgatcgcatccaagtgatggcagatggcttggcaacgcttggtattgattctaaagtgctagaagatggcattattatccaaggtaaaggcatccaaggtgagaaaaacgccatctttggcggtggtgtgattgagagtcatcacgatcatcggattgcgatgagttttgcggtggcaagcagccgcgccacagatgacattatcattcaaggcaccgagacagtcaataccagttttccaaattttgccgagcttgccaatcgtgttggtctgtctattgaggttaaataacccatctatttaaataatccatctaccgattgattatggtaattgctatggcaaaaacagtcacaaccacgccaaaagggttactgacagtgttatctgcttttttgatttggggctgttttccgctttatttcaaagagctgatagaatatgatgccatagaaatcatcgttcatcgtgtggtttggacttttgttatcttacttgggattaccataatcacaagacgctttaggtggattgatcaaatcaaaaagcagcccaaatggctgtttttaacctttcttgcttctgttttaatcgcaacaaactggttggtttatgtgtgggcagtaacgcacgatcaggtacttgaagcaagcttaggctactttatccaccctttggttggcgtgctattttcgatgctaatattcaaagaaaagctgcggttgatgcaaaaactcgctgtactactggccgccgccgctgttggcattcagattgtatggatgggcgggttgccttgggtgagtatgttattgccactgtcatggggactttatggcgttattcaaagacaaacgccttttgatgcacttgatgggttgtttcttgagacagcattgcttgtacctatatcactgatttggttgcaattttctcatgttgccagctcatcgatggcgttttgggtgtcatctgagatttggcttttgatgttagcaggtccagtgacattagtgccgctgcttttgtataatatatcgaccaagctggtacagtttaataccttatcttttttaaattacttaacgccaagcttgatatttttattggctattttttattatcacgagccttttgatgccaagcgattgttggtttttgtattaatttgggtcgggcttttgatgtttagtgcggatatgtttaaacataaaaaaggagcataaatgagcgatattgtgttcatacaagggcttaatattgatacggtgattggtgtctatgcttgggagcgtgtcatcaaacaaaggctcatcatcgatgcgcagatggtctgtgatatgacgcgtgccattgccgatgatgatgtggcgtatgtgattgattataaagccgtttgtgaggatattgaaaaattgtgccatgaggtgcaagctgagcttttagagaccttggcggataagattgcgcatcatgttttgaccaattatccatgctgtgaaatcacactgaccatacataagcccaatgccatcaagcaagctgatagcgtgggtattaaaatcatccgcaaggcaggtgtatgagcaaacaagcctatgcaaatgcgattgttatcgctttgggcagtaaccatgatgccaaggttgcgtttacttgtgccattaaatcgcttcaagagcttgggcgagtcgtattatcacagcgaatttgtggacaagatttcactgggcgtagtcagagaatttatcataatgcttgtgcttatattatactgacaaaaactatgcaatatacagacattgaacaaacgctgaaacaaattgaacggcgatgtggacgcaatcctgccaaaaaatgtaccaaatacgattatgaagtggtgatagatttggatattctggcggcaaggtttgatgaacagtggcagatgaatttggcacgactgccactaaaaaaccacgatatacaaggcataaagcaagttgcggcatttttattagaccaaatatagctgatatcgattcattattatcatcaagtgggctgtactgtgtgtctatctaaaatcatggtaagccataaagtgggtattcatttttaattagtcccactatttttttaataaatgaaactggtattggtatttatttttgtgaataaacttttggtaaaaatccttttataataaacaagaatatttatatattaaacttgttttaatcggttgcatgggcagacatctgcttgtgtgtatagtccaccatgagtaatggatgggtaattttatcagggtaatttcaatgacaaaatattataacgatcccgatcacatcgagacccaagagtggcttgatgcatttgaatcggtcataaaaaatgcagacaaagatcgtgcacagtttttattaaaagcactttataacatggctgttcaagaaggtttaccattcaaccgccttgatactgcatatatcaataccattccagccgaagatgagccaacttatcctggcgacttgcacatggagcgtaaaattcgtgcattgattcgttataacgccttggcaatggtcatgcgtgccaaccaaaataatgacgatttgggtgggcatttggcaacttttgcatcatcagcgacactgtatgagacgggatttaaccatttttggcgtgcacctagcgaaaaccatggcggtgatatgatttattatcaaggtcatggtgcaccaggcatgtatgcccgttcattcttagaaggtcgcttgtctgaagagcagctgattaattttcgccgtgaagtcgatggcaagggcttgtcaagctatccgcatccttatttaatgcctgattattggcagttcccaacagtatccatgggcttgggtcctttgatgtcaatttatcaggcccgtaatcaaaaatatctgaccaatcgtggcctaatcaaagatgaggatcgtaaagtttgggcatttttaggtgatggtgaaactgacgagcctgaaagcttgggtgctatctcaatggcaggtcgtgagaagctggataacctaatttgggtcatcaactgtaaccttcagcgtttggatggtcccgtgcgtggtaacggtaaaattatccaagagcttgaatcggtgttccgtggtgcaggctggcgagtgattaaagtcatttggggcgatcattgggatccattacttgccaaagatacctcaggggcactcaaaaaacgcatggaagaggtggtagatggtgagtatcagctctatgaagctcgtgatgccgcctttgttcgtaaggagttttttggtaagtatcctgagcttgaagagatggcaaaacagttcagtgatgaagagattatacgcctaaatcgtggcggtcacgaccccaaaaaagtctatgctgcctatgctgaagccatgaaaaccaaaggtcagccgacggtaattttggtgaaaacggtgaaaggctatggtttgtctactcagattcaatcggtcaataaagctcaccaaatcaaaaaaattgacgaaagtggcttaaaatacttccgtgaccgttttgatttaccattgaccgacgaacagctcaaagaattacctttttatcgcccaagtgaagattcggccgaatataaatatctgatgggtcgccgagaggctttgggcggtcatttgccatctcgtcgcagtggtcacattccacttgagattcctgagctttcggtatttaatcaagttctgcaaggctcaaaaggcaaagagcaatcaaccactatggtatttgtgcgtttattgtcagccctattaaaagataaaggtctaaataaacatgttgtgccgattgtgcctgatgaggcgcgtacctttggtctagaaggcatgttccgtcagcttggtatctattcatcagtgggtcaaaactatgtcgctgaagatgccgatgctttgatgggctatcgtgaagccaaagatggccatatgctagaagaaggcatcaatgaagcaggtgcaatgagtgcatggattgccttatcaaccagctattcggttaatgcgttaccgatgattccaatgtacatttattattcaatgtttggtttccagcgtattggtgatttggcgtgggcagcgggcgactgtcaagcacaaggatttttatttggtgcgacagcagggcgtaccacactaaatggtgaaggtttacagcatcaagatggccatagccatatcttatttggtaccgtacctaactgcgtaacctatgacccatgctatggttatgagctggctgtcgtcatgcacgatggtttacgccgtatgtatgcacaaggtgagcgagtttattattacatcaccttgatgaatgaaaactatgaacatccagccatgcctgagggtgttgaagaaggcattaagcgtggtatgtacctgttaaaagataatggctcaactcaagttcagctactgggttcgggtgtgattttgcgtgaagttgaaaaagcggcacaaatcttgcaagatgaatttggtatcactgccaatgtttggagtgtgaccagttttaatgaactgactcgtgatggcatggcgtgtgacgactacaaccgcctacacccaaccgccgaccaaaaaaccccatgggtaaccagtcaattggcatcacataaaggtattgtggttgcagcaacagattatatgcgtaattattcagaacaaatccgtggatggttacctgacagccgtccatatgtaaccttgggtactgatggctttgggcgttcggatagtcgagccaaattacgcagtttctttaatgttaatgcagaacatattgttgtggcaactttgaaaaaattggcagatgaaggtgacattgatgttcgcttggttcaagatgcgatcaacagttttgatattgacgcggatcaagcaccagcatggcagcggcagcctcaatatgatttcttcccagatgcaccagcaccaaaggcaactcgtgagccaaaccctgtacctgaactggtcgaagatgacaatcactgataactgcccaatttataggagaatatgatggaaatcaaagcccccgatttgggtgttgaatcagctgaagttgctgaaattatggtaaaagttggcgatagcgtcagcgaaaatgacaatatgattttggttgagtctgataaagcctctgttgaagtgccatcaactggtgctggtgttatcaaagaaattcatatctcggtcggtgatcacatctccgaaggagatttgttgttcactcttgacagtgatcaaagtggtgatgctcaaaaaactgactcaaaatccgacgatgaacctcaaacaaaacaatcagctaaagatgaagatgatatatctatcggtgatgatgagcaaacagacgatcagcctgacttaaatgaatcagctggtagtcaaacgcatcatttaccagaccttggcgtagatagtgccgaagttgctgatattatggtggcagttggtgatgaaattaccaaggatcaaccattgattttggttgagtctgacaaagcctcggttgaagtacctgcaccagttgatggcgtgatcgaagaaatcttaatcaaagcaggcgatagtgtctcaaatggtcaagcgtttattacgattaagagcaagggcatttcagccaaaaaatcatcaaataaagagcaaccagccgaaaaaaccaaagaagaagataccaaagctaaccaagcggcagtatctgaatcaaaaaacaagtctgtacaaagcccacaaaccaaactgccagaagctgtcgtaaacgaaaaagctcgacatgtttacgcaggcccagcggtgcgtaaacttgcgcgtgagcttggtgtggacatcagtgctgtgacaggtacagcagctcacgggcgaatcttaaaagaagacttatttggctatgtcaaatcagtcatcagcggttctaccagtcaagcaaaatctggcacgaccgaggtgcgttctggtttgccaagcttaccagatatgagcaataaagagatttggggcgagcttgaaatccaagatctcactcgtctacaaaaagtctctattccgcagctaaactacaatacctatctaccacaggtgacgcagtttgatcttgctgatatcacagataccgaaagcttgcgtaatgagcttaagggtgagtttaaggcagagggcattggtctgactattttggcatttattgttaaggcggtggcatatgcacttacccaaacgccgaaatttaatagccatttatcggatgataatacacaaattattatccgcaaatcggtaaatatgggtattgcggtagcaaccgatgatggtttgattgtacctgtgatcaagaatactcaagataaaggtatcaagcagattgccattgagattggtgaacttgccaaaaaagcgcgtgataaaaaactgaccgccaaagacctacaaggtgcaagctttaccatctcaagtcaaggcaatcttggcggcacagcctttacgccacttgtaaactggccacaggtcggtattttgggtgtatctgaagcatcgtatcagccaagatggaatggcaaagaatttgagccacggctcatgttgccactatcactgtcttatgatcaccgtgtgatcaatggtgcggatgctgcggtctttactcgccatattgcaaaattgttggcagatccgcgtcgtatcttgttataatttaatcgccaagactaacaacgcatcgatcaaaatcggtgcgtttttttataaattaatatgaattaacttaagaaatgatactttaaaataataatatgtataaattaaaaagatgatttttatcattaaatattaataataaaaacaaaagatgaaaatcggctggttattactctaatcatttaatcatttaatcaaaaaatacgcacacaaaacccagtttacaaaactcaaaaagctgatgcaattgacacttttttgctgtatagtgatatatactgatagttcacgatactattttatgtctatcaactcaaaaaatacttaagcaaaaggatattatatgaatacttatacaccgccagaagtttgggattatcaaagtatcaaagccaaaaacggtggcacatttggcggtacaaatcgccccacagcaggggcaacgcatgagaagaacttgcctgttggcgactcgccttatcagctgtattctttaaacacgcccaatggcattaaggtgaatatattactgcaggagctaaaacaacttggggcaatcacaggatatgatgcctataagatcaatatcatggcaggagatcaattcggatcggattttgtcaaaattaacccaaactccaaaattccagcattgcttgatcaaagtaccacgcctgctactcgtatctttgaaagcggggcgattttattgtatttagcccaaaaacataacgcctttatcccaactaatctcaatcagttatcagagctttactcatggctcatgtggcagatgggttcagcaccgtttgtgggtggtggttttggtcatttttatgcctatgcaccagagccaatggaatatcctattaaccgttatgcgatggagaccaaacgacaattggatgtcttagatcagcatttggcaaaccatacctttatgattaaagatgattatacgatcgctgatatggcgatttatccatggtatgggcgtttgtgcttgggagagctttatgtctctgatagctacgatgccgccaagtttttggaagtacatacttatcaaaatgtcattcgatgggcaaaaaccattgcagctcgtgaagcagtacaatacgcccaatctcttgagcttaaagcaatttgatgaccaagttatcttgataatatgtttacaattactcagtcaaatgatacccaaattctattggatcatctgattcattactaccagcaaacacaggcacagcgtcaaggtgaggcactgggtatttctgttttttcaccatttatcgtcattgttccatcgatggtacttggtgattggctcaatcgcagtattgctgaacggcttgggattagcacactttttatgacacaattttggggtcaatatcagtggcagcttattcagcaagtgcttaggattgatgctaatcatcatccttcagatgccttgcaggtgccagaggtggcggtactgtctggttcggtcatgcgttggcggatttttggctttatcaaaactttatctagtgagcagattatcaagattatgcaagatgatcatcatccgttgtatgattttttgatgacaatttatgacactcagaaccaaagcattccagagcatcggctatggcgaatctgtgaggaggtgtcgtcagtttttgtgcgatatttgacccatcgacccgaatggctacatgcatggacccatgacttaccactacctgaatcaatcgatgagatgatcgatactaaggatagatttgccaatgattatagcgatagtgatccaacacccaaatggctgattcagcaatatcacgatcttgaaaaattgttacgatatctgtggcgacagctattttctgaggtctatgcttatcgtgagacgcttgaggtgcgattttgggcagtgcttgatgggctgcgtggtgaaagtgtggcagctgaagcatataaaagcttgcctaatcacctttatttatttactatccagcaaattcccttgctggagctacaatttttaaaacgcttatcagttcatttgaatgtgcatttattgcattttaatccatcaaagatgttttgggcggatattgttgataaaaactggctggcaacgcagcgtattattaacccaaacttggtctatctaaaagattatggtcatgttttattatcaagattgggtaaagagtcccgagaaacttttgcgatgctggcagatatgtcgggcggtgattattattatgaaaaagaaggggtgaatcgcagattttatgaaacttatcgcacacccaaagattggcaagttgactggcaggatgattttgtatcgccggctcaagaatctaaaagtttattaaatcagctaaaatccgatattttaatgcttgaagatggcgaagctaccaaacaatggtggcaacaagaacttgtatcagccttcaaagatagtgcgttttgggaacaaaaagttaaaaccaaaagccagttaatgttgcctcttggattggataaaaatgatcaatctctacgcctgcccagtctaagtatccatgcctgccacagtctaaaacgacagcttgaagtggctcgtatgatcatagctcgctatcttaatgagccaaattctgacggtagctgccgaaaattatctgatatcgtggtttatttacctgaagctcaggcggccgaagatcttatccgactgatttttaatgatgatgttggtatggatgggctgaagctacctgccaaaattaccggtactgccagtcgtgaggtagattcgctgatggctgctatcagcgggttttatcggctacttggtgccaaaaatgcgcgtttttatcgtgatgatgtgtatgaatggctgatgacgccagcattgtacgaaagtttggggcttgattttgagtcagtcaatcgagcctgtcaattgctggatgcggctggctttcaccgaggatttgatgctgcacatttggcaatgacactaaatgaagctgatttggattatcgttatagttttagctatgctttagatcgtatcgtggcagggtttttaacaccctgtgattcaccatctccaagctcattgatgcatccgtttaaatggcgtgatgaatcatttcaagaagcaagcttgcctttagagggggtcacattagctgatcaaccgattgttgaggcgctgtgtctgattcatgcaggtctcagagaatttcgtgatgaatatcaacggcttgcacctgtgattgattggcttcatcatatcgagcatcgtgttattaatcgctattttaccaaatatcgtgaaaccagtcagatgcatgttattttcaaggtgatgaatggtattgcagccagcatccgtgccaatcatcattatcaccaccatactaagaattctacacaaggcactcaaaacatagagcttacacttgaatttgtgcttgagagtatgacgagtttacttgcctctcaagcggtgagtgctgagccagcaggcacgatcacttttgcgcgttttggggctttaagaaatgtgccttttggcttgacgctgatgctggatatgaatttatcggcattccctaggcaagatcgacaagcgcgcctagatttgatgaaagctgggcttaagcgtcgtggcgatcgttttttagaagatgatgacaatggtgcatttttagatgccatactgtgtagccgtgatgcttgtgccattttttataccaatgtcgccgatgacggcactcagctactgccagcatcaccagtcagtgagttgattgaattttttaaatctaatgtggattgggcagttgacttgcaggcggatcataccaatcaagccgatcaaatacatgctaaacttgcgaccatcgccccgaaattggttcagcagcttttgatttatgagcatgctgccaatgcctttgatgcgtctgtattttatgaaacaaaagagatggtctgtgatgaagatgatttggctgattttttaacccaaaaaattctgcacgccaaacaatcccaaacttattacttgccaccatcgcccatgatggtaaaattgcgtcatttattggatcaagattttaatcaatcacccatcataagcttacctgatgcgacaatttatcagatgcttgcagaagcgttacaaaacaacttacaaggtgacagcgggcaattagaggaagttttaaccatttttggcattcaattaccaaacagtatgccgcttaatcagatttatcatacacttaaaaatcctgccacagcctatctaaaacacaaactgccactactatatgacgcagaagacggctttttagaagagccgctgtctttggacggtttgggtcaatatcagctcaaagagaccttgattgatgccatggcacaaggggtatttgatggcatgcctatggatgagtttgactatcataagctcatagataccatttatatgaacgatgataaggcatcagagtttgctcacattgtacgcatctattatgataatttgctacccgctggtgcaaatcgtttgaccagtttggataatttggttggacaactggcgaagctgactgacgattttgcacaaaatctaacagatttacaagttaagaagcagcaattacaatattcttcaatgattagtccaaccaaagagcaatatattgcagttgagctaaatcatatcccgctggatattgtcgcaaaattacccatcagctgcgatcaatggttgcgagtgctaccaaatacagtgcgtgcagggcattttttacgcttttatttgcatcatttggcgtggcaagtgagcagacaaaccgaccaaaaagacattgaacaaaatcttggcagcagcttatggcagtttgggcaggctagcaatgatttaaaagactttcatctcaatgatgtttccttattaaagctaaaacccattcataaagagactgctaagcggcaactacaaaatttcatggtcatgggtttattagccaagcagatgcctttggtgctacctttgatgacttcactgaacattgtcgctttgaataccaaaaatgagcttgaatttggtgaaagccagtttaatgattggttgtcaggtcagtatgaagatcattaccaaggtcaatcttggcaaaagatattggatggcctgcagccactgcctgagattaaaaaaggtaaagaacttgcacaagttttatatgctggtttattggatgctctcatcattgacccaaccagtcaaacagtttgatggtttaatacttaaggcgataaacgcttttgttttttattgtgaaataatgataaattttaacagttatctgatctaagtttgctcaaacaatcgccaaactgattgtttgacaactgtttgagcaaaaatgaattactgattttgagcttggacggcaagcttatcgtataagccgccatcactaaaataagttttcatgatacttgcccagtctccaaagacatcattaggaaaaaaggttgtcatgacagggaatttatcggcgtgtttggctaggatatcggggctgcttggtcttaagaaaaacttcgtggcaagctcttgagcttcatcgctgtacagatgattgaggtattcggttgcagctttggttgtgcctttgttgtcggtaacagatttcaccacagcaatcggattttctgcattcactgtgtagcttgggtaaataatatccacattgccaaatttactcttaatcacattggcttcattttcaaaggtgattaagacatcaccgatgccacgctgggcaaaggttgttgttgccgcacgcccaccattttcaaatactttaacatggcttaaaagtgccttgacgaacgcatgagtttgagcttcgtcattatgataagcattcaagccatagccataagcacccaaaaacgcatagcgaccgttaccagaggtttttgggttggcgatgataatatctatgccacttgttgccaagtcattccaatctttaatgcctttggggttgccttctcgtaccaaaaatacgatagtactggtgaaaggaatggcatggtttgggaatgcgtgtcgccaattgccatccaccaatttggcatcagccaatagctcaatatcagagccttgattcatggtaacaatatccgcttgcagtccattttttaccgaaagtgcttgcttacttgagccaccatgagactgcttgatcttaattttggtatttgggtagttggtcaaataatgatttataaaaacttcattatacgctttataaaaatctcgagacacatcgtaagaaacattcaaaagctcaattggatcttgattagcttctgtactactggctgtcgtgtcagtattttggatggaagttttggtattgtttgagcaagcagttaagccaaaaaagataccaaacgctgttgccagcagtgttgtttttttaagcaatgttatcataataaatccaaaccaaactaaataaacagatagtgcatactttacgcaaattcgtcataaaaaaccaacgacaaatcagactttttattttctattttggaattaagcagtctgataaattagtctaagtagggctgatgattgatgaaaatacaaaaaaaatatgctatgcttaccgtattttatcccaatttaaggaatgtttatgactcagcttgacccaaattggcagacagatgcacttgatccaagtcttggttattttgagcagactttggcagttcgaggcggttatcatcgcactgatgaaggcgagcataacgaagctatttttacaaccagcagttatgtgtatgccagtgccgctgatgcagccgatcatttcaatggtaataaaaaaggcaatgtctattctcggcataccaatccaacggtcagagcctttgagcgtcgtttagctttacttgaaaatggcgagcgagctgtcgctaccgcatctggtatgggtgctattttgaccatgtgtttggcatacctaaaagcaggcgatcatttgctttgtgctaagcaattatttggctcatcgatcgcactctttgatggttattttcaggggtttggggtagaggtcagctatgtagattgttttgataatgaggcatgggcagcagcgatacgccctaatacccgtgtgctttattgtgaaagcccaagtaatcctttggcacagattgccgatttgcgttacttgtccaagcttgcccatgcacacgatgccttattgattgttgataattgttttgcaacaccagccatccaaaagcctttagagctaggagctgatgtggtcattcactcagccaccaaatacattgatgggcaagggcgtatcttgggcggtgcgcttgttgggcgtgatgagctgatggaaaaagcatttggtgtggtgcgtacaggcggcatcagcttgtcaccttttaatgcttgggtactcttaaaagggcttgaaacgctatctctacgcatgaaggtgcattgtgacaatgccaatcaagttgcccaatttttagccagtcatcctaatgtcaaaaaagttcatttttcaggactgtcagaccacccctcgcatgagcttgccaaatcacagcataccgcacttgaagtgactgggggagcatttggggcgatcattggttttgaagtggctgaccaagcatcggcatggcaagtgattgatagcacccgtatgattagtattactaataatttgggtgatgccaaaactaccattacccatcctgccaccaccacgcattttcgtatgacgcctgagcaacgtattgaagcaggtgttcatgatggtttgattcgattatcggtggggattgaagatgctcgtgatattatcaaagatttggcacatggcctagataatatttagataaaatttatagaattaatcacagttttatttaaaatcatccgtggtcaattctttaatcataaatgatttaaatcaaatcacaaaattactaagagaataaattgggttttaactctggtgcatttatgctaaaatataccaaataacaaccgataatagccaaacccaatcggttgggttatctattaccagttatcttattttcatcacacttgattataatttgagccatcacatgagttactctattttttgccaaactaaaaataatgtcttgttagagccgatgttttttggtcaacccgtgaatgtctctcgttatgatcaacaaaagcatccgatttttgagcaactcatcgaaaaacaactgtcatttttttggcgtcccgaagaaatcgatgtctcaaaggatcgtattgattttgccgaactttctacgcatgagcaacatatttttttaagtaatcttaaatatcagactctgttagacagtatccaaggtcgtagcccaaatgtggttttattgcccttagtttctattccagaacttgagacttggattgagacttggtcatttagtgagacgattcattcacgcagttacacacatattattcgcaatgtggtcaatgaccctagtaaaatttttgaagatattgtggataatgaatatattcttgagcgtgcaagtgatatcgccaaatattacgatgacttgcatttatgtgccaaattgtatgatttgcatggtgagggcgtttatcagattgatgggcagtctgttgaggttacgctaccaaaactaaaaaaacagctgtatttgtgtattgtcgctgtcaatgtgcttgaagccattcgcttttatgtatcatttgcctgttcgtttgcatttgctgagcgtaaagtgatggagggtaatgcgaaaattattaaaatgattgcgcgtgatgaagcattgcatttaaatggcactcagcatatgatcaatctgatgcgtcaaggcagagatgatcctgacatggttgccattgccgaagcgtgtcaagaagaagcgattgagatttttaaaagtgctgccgaacaagaaaaagcttgggcaaactatttattcaaagatggttcaatgattggtctaaatcgagatattttatgccagtatattgagtttattacaaatactcgtatgtcggctattggattgccagctatttttgaaaccaaaaccaatcccattccttggattaatgcttggctgtcttcagacaatgttcaggttgcccctcaagaaaccgaaattaccacttatttggttggtcagattgattctgatttagatgatgtggatttggacgattttgagctataactaattaccaaaagggcttgttatgagacaagccctaattcataaatcagtcataacaagaaaaataaagattgcgatatgggttgggtgtttactgacgagacacgattttacttgcatgaaaatgaaacactgctagacggcatgattcgtacagaacataaaaaggtacactacgaatgccgacagggttattgtggtacttgtcgcatgaaagtattggcaaccactgggtcaatcactttggttaaaaaaccgttggcaactttagcagatgatgaaatattggcctgttgctgcactttaaacggcacaactaaagtcagctattaccctaaaaatgaaaatcagttgccattgtttattgactgtgctgaatacttaccctaattgatatactatggttaaatcagccaaagcgaaattagggcgttttatccagtgaaaacgacgatcaatctgctttttggtgttttgggttgtctttttcggtaatgatgtcagcatcaggatcgccaaagcttaagatatcaccaaaatttggctgaacctttaataagagctgttgtgcttttaagtaaccatcattgatttgaactttttttagatttttcatgatcatatcgttattttttagccatcgaccaatgtcaagataaatgatattgcctttatgcccagtaaatggaatgcctttaattttaattttattcaaaataaaaggtaatggatctttgcgtagtagcgtacggtataagcccacgccaagtcgtgcagctggggctttataccactgcttactgtgtagctcaatcacatctgtatcaccgatttgcttaagcaccaaccgctgagtgtggcgatctagctgtagatgaaccagctcaaaattactggccactgttgtatatagacccatgatatcgactgtacaagtcaatctaagccagttgtcatgaatatccaattttaaattatgcaacagcccaacattttttgtaacaaaattatacaaagcatcattaacttgcttttgggtgagtgtgaccaaaagctcatcaaccaaattatcagctgctttgacatagccatgcttgatattgccaaaagtttgttgccaacttaagagcaagctttcattaaaccaactgctactgtctttggcatcaaattgattttcaagactcatcgtgtccgtttgcgttttatctgtatgataaaaagttgtgtcattgccgtttttcatcatttgggcattgggcagctgagaagaaaggtgggttgtttgagtattatccatatgattcgatcttaaatttgattatcctaaatcgctatggtttgataaccaaagcctactaaatataaattgatgagtattttagcaaatttttagtaggataagatgagtgaatcggtaattttttgtagctttaaaaaaacatatcatacagaacataccaatccatcatctatatcaaaaaatatacaaaataatgccaataaaagaaacatatttttggcataaatgatatcaatatcaaccttttaaaacatatctaccaaaaattttgttaaaatataccatgaattttatcaaaggaatttatcatgagtcaattttttgctcgattaactcctaagcaaaagcaatgtttagcaaccattcaaacgccgtattatttgcttgatgagcgtgccattattgacaatcttagcatcacgcaaaaggtttgtcatgagtctggtgtaaaagcgttacttgcactcaaatgctttgccacttggggggtttttgaatctatgaagccgtatctgcatggcacaacttcctcgtccttaaaggaagtgcgactgggcaaagaatactttggcggtgaaacgcatgcttatagcgtggcttatgccgatcatgaaattaaagaagttcttgattactgtgataagattatttttaattctattaatcaattaaaaagatttgggcaattggctcatgataaaaatatccccgttgggcttcgcctaaatcctcaaaccagcaactcatcatttatcattgccgaccctgccagaccatttagccgcttgggcgagcatgatgttgagagcattatggcgatagcggatcagattactggtgtgatgattcataataattgtgagaacactgattttgaggcatttagccaaagtttgaccgatatagaaaaccgctttggtgagttatttcatcgcttagaatggatcagctttggcggtggtatccattatattgaccaaaattatcctttagataaatttatcaataggcttaagaattttagcgaaacatatggtgtacaaatttatcttgagccaggggaggcgtcagtacatcaaggtgctgttcttgtgaccagcgtgcttgatgtgatgtataataataagccgctggcagtggttgatgcttctattgaggcacatatgttagatttgcttatttatcgtcaatcttcgccgctggcttatgtcaatgaaacaacctatgatatcacaggtgcagattttgatggcacatcggcagatgaaacctcagtaaggatctatggcaaatcctgtttggcgggtgatatttttggagattatacgcttaatgaacctctaaagattggtgacaaagtcgcttttggcaatgctgctgcttatacaatggttaagaaaaattggtttaatggcgttgacatgccatcgattgtgattattcgccaagatggcgaaatcatgattcaacgccaatttgattatgaggattataaggccagtctgtcctaaatgaaacattgcttttgagaataaatgattatctaactgcttgaaaatcaggcaaataatcgctattattaaagtttttatcatcaatagcaaataatttgggtgtgtgaattttccttgaagtcttcctttttaattcacacacaactattgataagctcatttcattcattgggcattaaggaggattgatgtctcaggcaaaaaatgtactcatcattggtgcaggtggtgtcgctcaggtggttgcacacaaatgtgcaatggcaaatgatatttttggggaaattcacatcgcatcacgcaagattgacaagtgtcaagctattgccaaaaatgtcgccaaaaagggcagttttaagcgtgatgccgttttgcatactcatgctgtagatgcgatggatcatcacgctgtggctgaattgatccgcaaaacaaatacagatatcgtgattaatgttggctcaccatttattaatatgagtgtgatggatgcgtgcatcgaaacaggtacgcattatttggatactgccatttatgaagatccgcataaaatttgcgaaacgccgccttggtatgaaaattatgagtggaaaaaacgagaagacttcaaaaaagcaggtgcaaccgccatcttgggtgtgggatttgatccaggtgttgtcaatgcatacgcacggttgggtgttgagtattttgataaagacagcgtaaccgatattgatatcattgatattaatgctggtagccatggcaaatattttgcaaccaattttgatcctgagattaattttcgtgagttcactggcgtggtttattcttggcaaaatagccaatggcagaccaaccaaatgtttgaagtcaagcggacagatgacttacccatcgtcggtattcaaaacagctatctaagcgggcatgatgaactgcactctttgcacaaaaacttaaatgtgccgaatatccgtttttggatggggtttggtgatcattatatcaatgtatttggcgtgctaaaaaatcttggtctcttatcagagcagccgatcacaactgccgagggtctagaagtagtgcctctaaaagtcgtcaaggcggttttacccaatcctgccagtcttgccgaacattatacaggtaagacctgtatcggcaataaagttaagggggaaaaagacggcgagactcaagagatatttatttataatatcatcgatcatgaagacgcttatgccgaagtcggtagtcaaggcatttcttataccgcaggtgtgccgcctgttgcagcagcacttttgatcgccagtggtgaatggaatgtaggtacgatggtcaatgttgaagagctagatgccagaccttttatcaatctactaaataccatgggtttgacgacacgcattgctgataaagatggcgatcgattgttagcattcggctaacctaagctttggatcacagtgcagcaacgcaaatgccttgctgcgtttttgctttttgtcaaaaatcacctgtgatataataatgccaaacaaacataagatgacaataaaaaaggcttatcatgcgaattcgcaaactgtttaaatttgaaaatgcacacattgtgcgtaattgttcatccgatcgctgtaagcgatccatacatgggcatagttatgaagttgaactgattttggaggcacatcgccttgatcacggtcaaatggtttatgattttgggctattaaagcaccatatcaaagatatcatagacagttttgaccacgccatcactttttgggatcaggacgatacacgctatatccaagcttgcaaggactttagtgcgcgttggataagtttgcctgtatcaccttcagccgaacagtttagtcgagtgattttcttttgggcagatgccattttgaatcaaactgtcatgcaaaacggtgaacaagatatcagcgtttattctgtcattgtccatgagacagcgacaggctatgctcagtgctttaagcaagatgttgaaaatgaacaaatgggcgtacttagcttagctgattttgagtttagtgagcaagttaaatcagagtggagcgaccctcagatgtatgataagctgctaaaaggtgacgcatttgtcaatccaaaagtggatttgcaggttcaagtatgatcagtcaaaccctatccttacacagtgaagcagatacccaagcacttgccgaaaaattggctcagatgaacttatcgggcagtgtgtggttgtcaggtgatttgggtgcaggcaaaacgactttggtacgctattggctacaagctatgggtcatcaaggtgctgtcaaaagccccacttacacgctggtagagccttatcaaatcaatcttcaaggaagattaaagcctgtttatcacgctgatttataccgcttaaatgaccctgaggagcttgattttattggcttttatgaatattttgatgaaccaaacagccttgttattattgagtgggcaagccgtgccagtcaggttttacccaaacctgattatcacattgatatcattcgccatcttgatgacaaaagagtcgttaccttgatgggccttgaggaagtttaatggatctgccgcattatacagatttgccaaataatagtgtcgtttgcttgatgtctccgaccgccagtggtaagacagatttggcgtttaagctatatgatacaggcaggtttgagctgatttctgttgatagtgcactgatatatgaaggcatggacattggcactgctaagccaaccaaagatgagctgaacgcttatccacattatttggtggatattttatcgcccgcccaaagctatagcgtcgcaaattttgtgcaagatgttgagcgattgattggcgagattcatgcgcgcaataaaatccctattttggtcggcggaacgatgatgtattatatggcactgcttgatgggatatctgcagtaccgcaaaccaatccaatgatccgcaatcaggtcaaaatttggcacgatgaaatgggtaataaagcgttatatgattacctaaaacaacatgaccccgtgatttgtcaaaaactcaaagtcacagacactcagcgtatcacgcgtgccgttgaggtacacttacaaacaggtaagccgttaagccattggcaatcaacaccaaagctggcaatcagccaccacccaaaatggcactggtacgctattattgttatgccagatagagcttggttgcatgagcggattgaacaaaggcttcaagtaatgtgggcggatggatttttacaagaagttatcggactaatcaagcagcatccaaatctgacggccgatatgccagcactgcgtgctgttggatatcggcaggtgcttgattatttgattgcaattgatcatgcctgtgtcactgcccatcttgggcttaagccttattatcatgctcaaaaatccagcaaaaaccaccaaattaattcaattcatcaagattttaacaaaaaatctaaaaaaaccatgacaaatacaagggatttggcttgtcaagatatgaaaaataaggcattatatgctacaaggcaattggcaaaacgccaatatacttggctgaagcaattggcacagacagacaaaccaaccaaaaataacttaacaatagtatcatttaatagcataaaacaagtagaacagcaatttttgcaataattcatgaggcgtcttctcatttacattgctttagctatttagattggagaaacttatgtcaaaaggacaaaccttacaagacccatttttgaatgctctgcgtaaagaccgtattccagtatcaatttttttggtcaatggcataaagctacaagggcagatcgaatcttttgatcaatatgtcgtattattaaaaaatacagtcagccaaatggtgtataagcatgccatttcaacggttgtacctaccagaaatcctcgcacagaaggcggctctacacctgcacaatccgctggtggatatcaaggcgctaatctgggtgtcatgtctagtggcacttatcaaggcggtggttttgagcgtcaaactcaaggcggatttgaccgtggtggtatgggctatcaaagcagctctcgcccacaaggcggctttactcgtacctctcaaactggttttgagcgtcaaactcaaggcggatttgaccgtggtggtatgggctatcaaggcggtggtatgaatcatactggttttgagcgtcaaaattttgatcgttcaggatttgaggagcgaggctttgatggtaaggcctttgaaagcaatgataccaaaaatttcaaccgctcaggttttgacgccaaacctgacccaaaatttaattatgatgacgattttgaaaatcaatcctgatttggtcatcatcttgacttatccaacccaaaatgaagtattttggcataaaaacttgtatacgagttaatcgtgtacaagttttttattgggtgataccttctaactcataaatgctaaaataccaatcaattaacagataaaatatgctattattatggcctgtttttttgatgaatgaaatggcaatgaaacaaaacaaccttgcacccagtgattacatccaagatgctattgacgcaatccgtaccgaacagcgtgctttggagttgttgattgatgagcttgatgagcgttttgtcaatgcatgtcaaacgattttaaactgttctggacgtgtggtcgtaacaggcatgggcaaatctggacatattggtcgtaagattgctgccacttttgcatcaacgggtacaccggccttttttatgcaccctggagaggcagggcatggtgatttgggaatgctggtacaaggcgatgtactcattgccatctcaaattcgggcgaatcagatgagatacgcatgctgctgcctgtcgtcaaacaactcaacattccactaattagcatcagtcgtgataagcgtggaattttgccaagatcagcggacattgcactgactttgggtctgtccgaagaagcatgcccccttggacttgcaccaacttcaagcaccacagccacactggctttgggcgatgcgttggcggttgcactgttgcacgcgcgtggatttaccagtcatgattttgcactgtctcatcctgcaggtgcgcttggacgcaggcttttgacgcgtgtatctgacatcatgcataccgatcatttacccgttgtacatcatcaatcaagcttgaatgaaactttattagtcatgaccagtggacgcttggggcttgctgtggtcgttgatgatgatggcaaagtggttggtatttttaccgatggggatttacgccgtaaattggctgagaataccaatctgacggttgaaattcagacactgatgaccaagacgccaaagtctgttgatcagcagatgcgtgcctctgatgcactgagtttgatgaacgaaaatgccatcagccagcttttggtgcttaaagatcgtcaattgattggcgtaattagtattcatgatatactaaaagctggcatcagctaatcttatatacacccaaactgacattaagcgttttgaaattaaaaagataaactcatgaatgaaatctaccaaaaagccaaacatatcaaactttttgccatggatgtcgatggtattttgtcggatgggcaaatcatttataattctgaaggcacagaaaccaaagcattttatgtgcaagatggtttgggcttgcaagcgctaaaacaatcaggcattattttggccattatcacaggtcgaagctctgccatggttgacagacgcgccaaagagcttggcatttcacatattatccaaggtcaagatgataaattgactgctttggtggggcttgctaagaagcttggcattgagttatcacactgtgcctatatcggtgatgatttgcctgatctaaaagctgtgcgtgaggcagggtttgggatcagtgtacctaatgggtgtgagcagacccgagcagtttcagattatatcacaaccaaaactgggggtaatggtgctgtcagggaggtttgtgagctgattttaaaggcacaaaataactttgatgcattcattgcaacatttgaataggcagcccaaatgaactttcgtattttaagtgtgttgggtgtcatagcattggcggttgcagtgtggtttttttatcaagaagatgttgaggtaaagcctgccttgcctgaagtgccgactgtggattctgaagttacccaaatcaaagccatccaaactgatcctaaaactggtgcaacagaatacacattgaccgcagattcattgattcaaaacgccaatggtcaagatgaaatgttgggtgcaaccattcactggcaaccccctcagggtgaaacctatacgctgactgccgaccgtgcgacacttgaacaaaacagtggcgatttgcgattatctcaaggatttcggttggtgcgtgcagccactgctgataagcctgaaatgattattgagggcttgaatattattggcaacaccaaaaatcgtactgtatctagccaagaccctctgactgtacaacagggcatggatcgctttaaagctcagggttttcgagcaaatctacagactggtgaatatgagtttgatcacattgaagtgctttttgatgcaccaaagcgtcagaatcagactttattttaattaaattttttaagttttttcaaggttttatatgaaagctgattttgtaattacaaaatacttatttttagcgtgcatagtcagtgtaccaatgattgcttcagcattgccttctgatgccaatcagccgatccgactattggccgatcgtgcaacttatagcgaacgcactggcgtaaccacttattctggtaaagtgacgattgagcaaggcacattaaagattgctgccgataatttgaccgtgaatcttgataccaataatcgcagcattaaatcagcggttgcaacagggcgacctgccaccatacaacaagtcgtaacccaagaaaagggattggcaaaaggtcaggcaaatcgcattgattataatgctgtcagtgggattgtaacgctgataggcaatgctaaactcactcaagctggatcaagtttttctggcaatacgatccgttatagcttgtctgttggtgatgttgaagccaatgctggtggtggtcagcgtgtagagttggtctttccaccaagcgactcaaattctcgcagtgggttacgctaaggcctgaatatgacaacagtattatcgatgcgtcacttgggtaagcgttatggtcaaagatgggtggtcgaggatgtctcttttgagattgagcaaggtcaagtggtcggtatcttaggtcctaatggtgcaggcaaaaccacaagtttttatatggtgatcggtcttgtgcctatggataaaggtcaggtaattttaggtaaccaagatatttcaaaaaatgccatgcatgagcgtgctgccaaaggtatcggttatctgccccaagaatcttctatctttcgtaagctgaccgtcgaacaaaatatcatggcaatcttacagacacgcaaggatttaacacaaacagagcagcgtcagcagcttgaaaagctgatggctgattttcatttagagcatgtccgccattcgttgggcatgagtgtatcaggcggtgaacgcagaaggtgcgagattgcacgctgtttggcatcaaatcccaaattcatcttattggatgaaccatttgcaggcgttgatccaatttctgtgagtgatatcatgcaggtcatcgaaactttgcgtgagcgtgggattggtgtactaattaccgatcataatgttcgtgaaacactgtcaatttgccaaaaagcttatatcgtttctgaagggaaagttatcgcccaaggtaataaagatgaaattttatttaatgagttagttcgtaaggtctatcttggccaagatttcgttgcttaagtatttataaaataaaataattctgctttattacaataaaaccgctccaagatagagcggttttattgtggtttaagggcttacgccgaagccattaagctggcattgccccctgcagcggttgtattatagctttggctgacctcatgatacagtcttgcaatatcaagcccattggtggcatcaatgatacggcgaattgaaccatctagtttggcaatactaacttgttcatcagcaggcattgttgataatgcaatgatgatatcattagcattcaccgcaggttcttcaacaacttttaggacgccaattaactcattggcatgctctgccagtacatgagatgggcgaacctgagtgatgataccattggctgccaagattgccaaggcgtctagtgcttgggattgtgatccaccatacaaagcaacttgttttggcgcatgccaacttagggtgttagtctctcctgtcgggcctggtaggatgaccgaagcttgatttaaagatgagttgatggcttgttgtgcgacagcatcaaaatttgccttctcattatcagatgtcaaaagcttgtgcgctaaccgctgtactttgcttagtgctgtatgatcaatactcgctggcgtatcaaccgttggtttttgccagtttgtcagctgacttagacgctgaagataaaaaggaccgcctgccttaggacctgtaccactcataccatgtccaccaaaaggttgaacgccaacgactgcaccaacaatattacggttaatataaacattgcctgcttggatacggtcagtaatttgatcaatcgtaccatcaatgcgactatggataccgtgggttagggcgtatccttttttattgatactgtctatcaaatcattcagctcatgggcagcaaatcgtacaacatgcaagacagggccaaaaacttcctttttaagctgtgatagatctttgagttcaaacaaaatcggtgcaacaaaggttgatggtgcatctgatgcgatggcaacttcatgataaggtgcaatttgtttgagtgcgttgatgtgttcaagtagatttttttgtgcttcttcatcaatcacaggtccaacatctgttgaaagggcggcaggattatcaacaatcagctcatccattgcccctttaatcattgcaaccacatgatcagcaatgtcttcttggacacataaaattctcaaagcagagcaccgctgacctgctgaatcaaatgctgatgccagtacatcggcacaaacttgttcgggtagagcggtactatcaacaatcattgcattcatcccacctgtttcggcgatgagtactggattatcatcacgagcagcaagtagtttattgatatgtttggcaacttctgttgagccagtgaaaataacaccgttgatgcgttcatctgatgttaaagctgctccaacatcgcctgcacctaagacaagctgtaaagcatcttttggcacaccagactcatgtagccaagatactgccaaatgtgcgattaaactggtttgttcggcaggtttggcaacaacagtattacctgttaccaatgccgagacaacctcaccgacaaaaatagctagggggaagttccatgggctaatcgcaacgaccgtaccaacagggctagacagattaagcgattctgcttcatcagcataataacgacaaaaatcaaccgcttcacgaacctcagcaatggcatttaataaggttttgcctgcttcacggacggcaaccatcatcaatagtgccatatgagcagagtcttccatcaaatctgcaaaacggcgtaaaatggcagctcgttcggcagcagagacagtctgccaatttgtttgggcgtttaaagctgtggtgataacatctggtacgctgtttggatcaataaaagaaacttgaccaacaacatctcgatgatcacttggatttaagacagtatgagcaggctgatggctgacatctactgccgttaatgaagagacattaaaatcaatctgactggcaggttgcattaagtcttctaatctgccaagtgtgtgttcattggttaaatccaatccaagcgagtttttgcgatcaccataaatatggcgaggtggtggcgtgagtggattttgagagatgccattggctttgacaatatcaatgggcgattcaaccaattcatcaatactgacttgctcatcaacaatgcgattaacaaaagaggagtttgccccattttctagcaagcggcgtaccaaataagccagtagcgttttatgagtaccaacaggcgcataaatacgcactcgacgacccaaattattatcaccaacaacttggtcatacagtgtttcgcccataccgtgcaagcattgaaattcaaattctttatctttacccatttcatagatggttgctaaactttgggcattatgcgtggcaaattgtggatagatcacatcttgagcagccaataattttttagcacaggctaaataagatacatcggtatgtaccttacgggtatatacagggtaaccatccaagccatcaacttgggcccatttgatttcgctatcccaataagcacctttaaccaagcgaatcatcagtttttgatgattgcgacgagccaaatcaatcaaataatcaatcacataagggcagcgtttttgatatgcttgtaccacaaaaccaataccattaaatcccgctaaatcaggatcagaaaccaatttttccatcaagtctaatgacaactcaagacggttagcctcttcagcgtcaatatttagaccgatattgtattctttggcaagtacaaacaaggcttttaggcgtggcaacagctcattcatcacgcgtgcgtgttgtgcacgaaaatagcgtgggtgaatggcagacaatttaactgaaataccattaccatcataaacgcctcgaccaacagaatctttgccaatcgcatgaattgcagtcacataatcttgataatagcgatcagcgtcttcagcggtcatggctgcctcaccaagcatatcaaagctgaaacgatatccaagcttttcacgctctttaccattagacaaagcttcttggatcgtctgaccagtaacaaattgtttacccaagattttcatggcatggttaacgcctgcacgaataaatggtgcgccacctttttgtagaacacgggttaatgccgagcttagccctttttcgctggtaggttgggtgagtttgcctgtcaaaaccaaaccccaagcagcagcattcacaaacattgatggactatgaccgatatggcttttccaattaccatcagacagtttatcttgaatcagtctgtctcgtgtggttgtatctggaatgcgtagcaaggcttctgccaaacacatcaatgccacaccttcttcgctggataaggaaaattcgtgcatgagtgcatcaacgcccgaggatttgctgcggttggttcgaacttgggtaattaatcggcgagccaaatcgctgatgtgtgatttttcatcattattgaagtttagagtttctaataaatttgatactgcggtgacttcatctaatcgataagcactggtaatggcgtctcgtaaggtggattgagtgtgggtaaagttaaacataaagtaactcacaaaatgaaaatataagaaccggttaaactgtcaaaataaatgatataaaaatcagaattaagcgttaattatatcttatatgaacatataaaccaagtaaatttttatgcattttccgtgatattaccgattttttaagtatgatatttttttaagcttaagataattattttttatgaattggttaaaactatcaggctggtttgaccaaacagttagcccaataactttaataaaaacagtagtgttttggtatggtttagctcaggtggtttattgtataatcatacggtaagggctgatttagacaacaggtgatgattaatgaaaatcatgggggaggtcattccaacttgggtattaatgggtgctgtggttttggcattttgtgcaggtattttaaatacaactgccttaatgggtatcacccatatttcagcatcacatgtgacaggcaatgtcagtttatttgtggtttcaatgcttagcaatgactggttaaattttaagttattattaatatccatcgggtctttttgggtaggatcggtattaagtggtgctatcattggctcaagtgaactcaatatccaccaaaattatggctatgccatgcttttagaggtgctgatgctgtgcttgagcctttggatgtatttattgacacatcattttttgggtcaaatgatgattgccatggcgtgcggactccaaaactcaatggttgcaacttatcatggcacagtcattcgcaccacacatttaaccggtatcacttcagacttgggtgctacagtaggtaactggttggttggtcggcgtgtcagcttgcgtaaaatcattttacatagctcgctgtggtggggattttttatgggcagtatttcagctgtacttttatacagttacatcggatatttatcgatgattttgccaattacgatcattttgattgccgctttattttatcatcaaatgggcaaactatatactcaaatattaagacttgtacgcctaaaactgctccaaaatcaacgaaaaaaacgccgctcaaagtctcatcattccaaactatccacttaaaacatgccaaaatcgtttggcatgttttaaggatttgagttatttagttatttgtccaaatttggcttagttttacccacggtgatgatgataaattcatcaggcttgatacgcaagttcagtgcggtattaacactatttatcgtggcattatccaagcgattgagcgtatggttaagatgatcttttggataatcggcaacaaataaagcaccaatgacacgatgaatactggcattgcttgaaaaaatattggcaaaaccatttttattacccaaacgcaccaattcaagctcttcttgggttatgccttcattcagcgactcattaatgatgtgtagcgtctctaaaatggcatcggctgctttatcgccatcggttgaaaattcaaccacataattaccacctgctctgaggcgttccataccgccataaatgccataagtgtagcctttttgctctcgaatggttttcatcaatctggcattaaaatcaccacctgccaaaatttcattacctaatgaaaaatcgctgaactcttgacgacctgctttgtccgtgcgtactttactggtggggtgaccgatgatgatttgggtttgactactgttgtgaggaatatggatatggcgagccttaactggttttgtcaaatccagcgtatttttatacgacttgcctgtcggtaatttggcggtcagatggttggcaagtgatttggcttgctcggcggtcatatcacctgtaatcaccagtgtcgcattatttgcattaataaaagtatgccaaaaattaagcagctcatcacgatcaattttggcaatactatcttcatcgcctgtggttgcgtgtgcataaggatgattttcatatacggcttgatgataagcaacagaagctacatgataagggttttgctttttttgttttaaactggtgatgagctgatttttgttgcgttgtagagtcttatcatcaaaagcaggttgagtgacagcatcgaccattaaatcggcggcttgatttaataatgattgatcagacaagcttcttaatgataaagttaagttatccttatttgctgtactggtaaaatcaatgccaagacgctctttggcagcaacaaactcatcttcagaaaggctgtcagttccttgggtgagcatggttgcaaccatgttagccgtgcctgatttgccaacctgatggtcatacgctgaccctgcattaaaatacaagctgatatcgacaataggcagctcatgtaatggcgtaaaagcaacgctcacaccgttgttggtttgaaaatattgtgtatttggaatattgacggtcagctcacccaattgattgatactatcaataatactatcatcagcaagtttaagctcgctactggttagcgtgtgatggtgtgtcgtatttgcttgcactgatgggctaatgaataataaaacgccaatgatggcagctgataggcgatgttttgttaaatgtttcatgtcagtgtccatcgattaatgagtgtctgagggcgattgtgtatttttgggcaatacataaaccgtggttagattgtctttggtcagatattttttacccacagcttggatgtctgatttactgactttgtccaatgcttttgggagagtatctaaagtatctaaaggcaaccccaacgcagacaaagcacctaaattagaggcttgtttggcgatactatcattggcaaacaccaaagatgataacaagcctgcacgactacgggccagttcatcatccgtgatttgatcgttggtgatggcattaagctctgctaatatggcagcttcagcatctgccaagctgacaccctcacgaggtgtggcaataatggtaaataaatcatcactttttgagagcatattatagcgaatagaaacgctatttagtatttgtaatttgcgaatcagatgacgctcaaaacgtgctgataagccgccatcagcaatatcgctaagcagtgataatgcatgagcttctttggtatgatttttaatagtacgactacctaaagtaggtacattaaaccccatgattaagcttggtactttaacattttgatagctattggcctgcgtatagccacgatgacttggctggctaagtggggtgcgttttggtaatgatgatggttttagagtgccaaaatatttttcgatccaaggcagggcggttttggggtcgatgtcgccaactagtactaatgttgcattgtttggtgcgtaccattgatcataccaattttgcaagtctgttaccgtaattgcttcaatctctggcatgctaccaatgatggggagacctttgggagaatttggtagggcaattgccaaaaactcttcatgagctttggcggtgggtttgtcgtctgtggttaggcggcgttcttctttgattacctgtttttcggtggcaacctcctcagcggttaagatgaggttattcatgcgattggcttctatttgtagtgccaatggaaattgattggcaggcaggctttcataataggccgtaaattcatcactggtaaaggcatttaactcacccccaaaatgactaatgaggcgttgatagtcgtcatgactgacacctttggcatctttaaacatcatgtgttctaaaaaatgtgaaataccaccttttccaataggctcatcacttgaacccacatcataccaaacttgggtcatcacaatgggcgctcggctgtcttgtttgatgatgacctttagaccattttttaaggtttgggtataaatatcgtgatgttctgcttgggtgcttggggtttttgtggttgagatagcgttttgggtatggtcaagactttgacaggcagataagccaaccgccgcaccaatcacaaaagccaatggcatgagtttcatagtatatccttattttgttttataatgtggttgtaccgccaatcatcaccgatgctgtcggtgaaacactggcacagccgatgactgtcaaagcaaatatcatcagtaagcaactttttaataagtcattcataaatcactccagctaaattatcgctaaatcatctgaccattattttgatgacctaagtattataatgataatcatcatcaaaaacacaacactaaagccaaatgtcacagattatctacattgagtaataaatgcttatcaaatgaaaattttgtcaaacaaaaactgcttaatctctgtcataaatctgtcatgaatcagtcactaatctgtcatgcttgcttgctaagataacggcattcaccaagccagcttactatggcaagcctaaggaaatacagatgaataacccacacgattttatcgaagactcaaacccaaccagcaacccaaactttgctgatatcctaaatcaaaccgtgtcacgccgcaccattttaaaaggtggtgcaggcttgacggctgctgccatgtttggctcattgcctttgatggcgagcacaaattccaccacggcaccaacgaaaacaaatttggcacgcccaacaaaacttcaattcaaagccgtacctcattatacaggcaatgacatgaaagttgccgaaggctacacggcgcgtgcatttttgcatttgggtgagccgctgatcgatggcatcgaagcgttccgtgacaaccgcgaacattcaggcgaatcatttttgtatcgcatgggcgataaccacgacggtatgcatttttatggcatggtcaacggcaaatttgatcccaatcaatcaaatcgtgctttgttggcaatcaaccatgaatataccaacgaaaatctacacccaatgggtttctttacacaggaagataacaatgccgcgccgatttatcgaaaaaaacgccttgctatggatgtgcgtcgcgatgctaacgctcatggcgtgactgtggttgagctaagaaagacaggcgatcgctatgaaatggtcaaaaactcaccatttaataagcgtttttcaagtgcaacgacggtagattttgcaggtgcagcagcaggtagtaaaatgcttatcaccaaatttgacaaatcaggcaaaagcacttggggcatcaataaccaatgtggttcaggtatgtcaccatggggcacttatctaaccaccgaagaaaactttttaaatgtctttgcacgcggtgaagacaaagctaaaatcggcacccaagcagatgtcgcactggctcgctatggcttaaaagaaaacagcacaggcggcggctatttgtggcacactgctgacgataaagaaggcattgtaactgatgaattcagtcgctgggaagccactgccaaagccaatgacgcaagtgctgattatcgtaacgggtttaatggctttggatacatcgtagaaattgatccatttgatccaaaagctcgcgcagtaaagcgcacaagcctggggcgctttgctcatgaaaactgtgcctttgtaccgcctgtcgctggcaaacctgtggtcttttatatgggtgatgatgcgcgcggtgagtacatttataaatttgtctctaaagccaaatggtcaccaagcgatgtgggcaaaggtctaaaagcaggcgataaatacatgaacaatggcacgctgtatgttgctgtgtttaatacagatggtacaggtgaatggcgtgagctgtcttatggtaaagtcaatcataaagattatccgttcaaagaccaagccgatgttgtcatcaatgctcgcttggcagccgacagcgtaggcgcaaccaagatggaccgtcctgagtggatctcggtcagtccgatcacaggcgaagtttatgtgactttgaccaacaactcaaagcgcacagttgaagctaccgatgccgccaacccaagaagctataacaacaaaggcaaccaacatggtcatatcgttcgctggcgtgagcgcggtgagcataccgcaacagcgtttgattgggatgtgtatttgtttgctgcgccaaatgatttgactgagcaaaacttatccaatctatctgctgaaaatgacttgtcttctccagatggcttgtattttgatccacgtggtgtcttgtggattcaaacggatgacagtgcttataccaaaactaccaactgtatgctacttgcagcgctgcctagccatgtgggtgatggtaaaatcatgaccacaaccacaggacgtaatacgcctgtgggtgcaatggcgactaatgataccctaaaaagattctttgtgggtccaaaaggctgtgaggtcacaggcatcaccatgacacccgacttcaaaaccttattcatcaatatccagcatcctggcgaagacagccctgatgtgacttggggtgcggttccaggcggacgcgtaccgcgctcagcgacagtcatgattaccaaaaatgatggcggcgtgatcttaggcgaatcattacaaaacatggcctaatatcagctaataccaccgatccccaagcatgttatgataggttttaaggtttttgtgtaatgaattttgggtaaatttgtgctacaatcaaaatcattgaacaaaatcataaaatgtaggtaaggatatgagcgaaaacgaaaaaggtggctggttttcccgcatgaaagctggactatcaaagtcaagtaaaaacctatcagaagggctggttaatgtcttggttggtggcaaacagattgatgatgagctgcttgaggaagttgaagatcagctactggttgctgatattggtgtcaatgccaccaatcgcattatcaaaaatctcaccgagcagaccgcgcgtggcgatttgatttactcgcatgctttgtataaagcactcaaaaccgagttgaccgacattttgacgccaaaagttgcacctttgattattgataccaccaaaaagccctatgtcattttgatggtgggtgtcaatggtgttggtaagaccaccacaatcggtaagcttgccaagcgtttacaaaatgagggtaagtcggtcatgcttgccgctggcgacacttttcgagccgccgccaccgagcagctacaaatttggggtgagcgaaatggcattgctgtcatcgctcaaggtcatggctcagacagtgcttcggtgatttttgatgccatgcagtctgccaaggcaaagggcattgatgtgcttatcgctgatacagcaggacgcctacaaaataaaacgcatctgatgaatgaacttgaaaaggttgtgcgtgtgatgaaaaagggcgacgaaactgctccgcatgagacgatgatcgtgctagatgcaggcacaggtcaaaacgccatcaatcaagtgcaagtattttcagaagcagtgaatttaactggcatcagtgttacaaagctagatgggacagccaaaggtggtgtggtatttaatatcgcccaaaatacggatattcccatccgttttatcggcgttggagagggtattgacgacctacagccatttaagccaaaagattttgttgatgcacttttggaaaaagaagaatgatggcaaaagcagttagcactaactatcatccaccaagttttttacctgatttgccaaccatgcacctaactgccagtcacggtaagctgattttacttgattggcaagatatcaaaacccaaaaactgctcaatcaagccaatcagcatgcggtatttataaaaccatcccaattagatatcaatcagcccgatcaggcgattcttttacagaccaccgagcagcttaatgagtactttgatggtactcgcaggaactttagcataccgcttgatttttcttatggcactcaatttcagcaacaggtttgggcggcactgttgacgattgattatggtcagaccatcagctatgccaagcttgccacactcattgataaacccaaagcgtttcgcgcctgtgccaatgccaatggcaaaaatcctttaagcctaatcgttccttgtcaccgagtggttgcatctgatgggggtttgggtggttatacaggtggtgttgccattaaaaaagcattattagattttgagatggcgtgtcacttaagcaaaaataaaacaccgactgattttgattatttatgctataattagataattttaatttcacatttgatttaatttcatatttgatggtttaaggaagtgtttatgccttatgcactgttgcgtccgttattatttagtatgaatcctgagcaagctcacgaaaaaacgcttcagatgcttgaatctgccaacaaagcacatcttttgggttttgtgtatgctaagcaggcgctaccgactgagtgcatgggtatttctttattaaacccagtgggcttggcggcaggtctggataaaaatggggcgtatattgatgccctaagtgagctgggatttgggtttttggaaattggtacggtcaccccaaagcctcaaatgggtaacgacaaacctcgtttattccgcatcaaagaagcgaacggtattattaatcgaatgggatttaataatcatggcgtggatgtgatgattgataatattgaacaggcaaagtatcaaggtgttcttggtatcaatatcggtaaaaatgccacgacgcctgttgaaaatgcacttgatgattatatttattgtcttgagcgtgtttatccatatgccagctatatcacgattaatatttcaagccccaataccaaaaatttgcgtaatttacaaagtggcgatgccttatcacaactacttgatggcataaaaaactgtcagttacgcttagccaatgactatggattttatgtacctttggcattgaagattgcacctgatttagatttaagtcagattgatgacatttctcgcacagtgattgattttgagattgatggtttgattgcaacaaataccaccttatcacgcacaggcgttgaaggttttcgtcatggagaagaagcgggtgggttatcgggtcgtcctgtcaatcaccaaagtacgctgattttatcccaatttgcagaccgtatcgctgataaagtcgatttgattggcgtgggtggtattgagacaggcgaacttgctgtcaaaaaacttcatgcaggtgctaaggcggttcagttgtactctgggctaatttataaaggtcctgggcttgtgacggattgcgttcaggcactctcaggtgatcgctacggataatcctatgaatgtgattgacattattatcagcattgttgtgcttttgggtatttggcgtggttttactgttggcatgataaaaagcatggcaatgctgttatcgtggtttattgccttagtggttgcatcaaaaacagcaaatagtttttctcatatatttgccccatggattgacaacccagttttacaagttgccatggcgtttattgtcatcatgctgatcactgttttacttgtcggcacagttgctagcctattatcacgctcatttaaggcattaaaattgggatttttggatcgtattggcggcagtgtatttggtgccgccactggcatgttaaaggttttgattgtcctaagtatcatctctccgatattaatgctaacacctgctgctcagtcatctgtacttgttccaagcctattgccttatgcaccaatggcaaagaatttcttacataaggcatttgatagtacttggaatcagctggaaaatccctataaaaatcaacgatgataatatcatttaacatcaatttttaataattattaacttattgttatcaataatttggagtaactatgtgtggtgtaatcggcgttatggcgcatgaacctgtcaatcaaatattgtatgatggtttaaccatgctacagcaccgtggtcaagatgcggcgggtattgtcaccttaaaagacaatcgcctctatctgcgtaaagataatggtatggtgcgtgatgtattcttaaatcaacatatgacacgcttggtgggcaattgtggtatcggtcatgtacgctatcctaccgcaggaacttctagtaccgcagaagctcagcccttatatgtcaattccccttatggcattgctttggcacataatggcaacttaaccaatgccgaaaaattggcgcgtgagctgtacgaagaagatcgccgtcatctcaatactcagtcagattctgaagttttgcttaatatttttgcccacgaacttcaaaaatttaccaagcctgctttagaatctgatgatatctttgaggcactgactaagctgtataaacgctgtcaaggtgcgtttggtgtggtggctttgattacaggtcacggtttggtggcatttcgtgatcctaatggcattcgtccattggtctatggacgccgattgaccgaaaaaggcatagaatatatggtcgcatcagagtcagtcgcattacaagcgcttggctttgagatagtcagagatatcgcacctggtgaagcgatttttattgatctaaaccacagcattcacacgcatcagtgtgtacctatcgaaaaaggtcaatacacgccttgtatctttgaatatgtgtattttgctcgccctgattctattattgataatatctccgtccacaaggcaagaatgcgtatgggcgaaaaattagccgatcaaattttgcgtgaatggggtgaagatcatgggattgatgtggtcataccgattccagatacctcaagaaattctgcgttagagcttgcggttcgcttaaatgtcaaataccgtgagggctttaataaaaatcgctatattggccgcacctttatcatgccaggtcagcagcagcgcaaaaaaagcgtccgccaaaaattaaatgccgtaccattagaatttaaaaacaaaaatgtgcttttggtcgatgattcaatcgttcgtggtactacctgctatgagattattcagatggctcgagatgcaggtgctaaaaaagtcttttttgcgtcggcagcgccgccagtcatgtaccccaatgtttatggcattgatatgcctgtgcgtggtgagctgatttcatcaggccgtagtgttgaagaagtgtgcgagattatcggtgccgatcgtttaattttccaagacttaggtgatttgatcgaagcggtcaaagacaccaaacacagccaagttgacggctttgattgttcggtttttgatggtaaatatattgcaggcgatattgatgaagtttatttaaccgatcttcaaaataaaagaaatgacgctgtcaaagataaaggtgtcaccgtcgtcgatacacccgttgatatgacgggcgtatctgcagtttaattgaaatgtcattgaaataaaccaaaattttaaccgctaaaaagcgccaaaaatagcttctcggtgctttttatcacaatatttttattgatgtgtttaaacacttgagtgatgatgcctattgtgattggtaaaaatgagattatttttggaagtatttatgaaaaatcagtctgccacccattgggcattatctgtcatgacaatcagtgtgcttttaagtgcctgtacttctcatgtgacacatgagcgtgcaccaatcaaagttgtgcaggttacacccaatcccacacaggttgcaccgcctgctcaagtgcctactcaagctttgaccaaagtacctacctcaaccgttcagcctacgaccgccaaacctgcatccgttgtggtacaaaaatcggtcgtcgtacaaaaaccagcccccaccaacacacccagcatgaccacccaaagtcattatgctacctttgctgaatggaaacatgattttattcatcgtgccttggcaaaaggtattaatgccaatagtttaaatgcattgatgggtaataccacgctcaatcagcgtgtgatagagttggatcgtagtcaagctgaattcaccaaaatgccctgggaatatgtcgaatcagccgcctcttcaaatcgcatcagccaaggcagatccaaattaaatgaaaatttgagcatattaacctcagctgaatctatctatggcacaccaaaagagattaccgccgccatttggggtatggagtcatcatacggtgctggcatgggtagtatggatttggtcagtgcgttatcaagcctagcgtatgatggtcgccgccgtgagtttgctgaaaaccagttacttgcgatgcttttaatgattgagcgtggtgatgtggcagcatctcagctaaaaggctcatgggcaggaggcatgggacatactcaatttatcccaacgacatggatacaagagagtatcgatggtgatgccaatggtcgaaaaaacccttggaatcgccaagatgccttaacttccactgcaagttatttggcaaatgctggctggattcgtggcttacagcctttttatgaagtgcgattaccaactgggtttgactttttacagctaaatagcaagcgtagccttgatgcgtggaaggcattagggctggtcagtgcaagcggtgaatattttggtggcgtacatgaagcacaattgtggctacctgctggtcaatatgggccagcattgctactcaccaaaaattttgaggtcattcgtgtttataacaattcctcaagctatgctttgggtgtttctttgcttgccaaaaaaattgccggtggccatgatcttgttcaatcttggccacgtcatgaacagccattatcacgcacccaaatcatcaatttacaaaaaaacttaactgcacaaggctatgacacccaaggcattgacggtgtcgctggtagtaatacccgccaagcatttgcacgctggcaagctgctaatggtcaaataccagatggattcatcagccagcgtacggctggtcatttggtctggtaaattcattgatgtcattaaccacctttggttaagtgattgcccttgcaaaaccccattatcatccccatggtaatggggtttgattaatttaactgtttaaagaagaagaaaaatccattatgcgactgcccgaaacgaccagagccgaacgacaaaccaaccaacttgctcgtagaattcaagaaaaagcccagctgacaggcgtgaatgtctcaggaacacaaatctccagtcaagcatttgagatggtaaccgattttgagccatcgggcgatcagccaaaagccatcgccgagcttgtaaaaggtgttgaagcggacatgcgtggtcaacttttgttgggtgtgacaggttctggtaaaacctacaccatggcaaaggtgattgccgagtgcggtcgtcctgccatcatcatggcacataataagactttggcagctcagctatatggtgaatttaaggcattttttccgaataatgccgttgaatattttgtcagttattatgattattatcagcctgaagcctatgtaccagccagcgatacttttattgagaaagattctgccattaacgatcatattgaccaaatgcgactgtcagcaactcgtgccttattagagcgacgagatgccatcatcgtggcatcagtatcggcaatttatggcttgggtgatcctgaaagctacctaaaaatgttgcttcatattgttgttggtgatcgagtgcatcgtgatgcggtaatcaaacgacttgttgaattacaatacgaacgcaatgaactggattttgggcgagggacttatcgcattcgtggcgaaactttggatatttatcctgctgaaagtgaaagcttggcagtacgcatacagatgtttgatgatgaaattgaaaaaattacttggtttgaccccttgacgggtaaaaatatcaaatcagtaccacgcattaccatttatccaaaatcacattatgtcactccaaaagataagctagaagctgccagtgccacgatcaaagaagagcttgcccaaaggctagaatattttcgtgctaatgataaattcattgaagcacaacgcatcaaagagcgtacacagtatgatcttgagatgattgggcagcttggttattgtaatggtattgaaaactactctcgtcatctgtcaggtcgaccagcaggtgaagcaccgccaactttatttgattacattccctcagatgcactgctgtttattgatgaaagtcatgtgactgtgcctcagattggtgcgatgtataaaggcgataaaagccgcaaagaaacgcttgttcaatatgggtttcgcttgccgagtgctatggataatcgacccatgaaatttgaagaatgggaaaaaatttccccagcgaccatttttgtctctgccacgcctgctcaatatgagcttgaaaaatccgaacaagtggttgagcaggtcgtgcgtccaacgggtcttgtagatccgatacttgaaatccgccctgtattaacccaagttgatgatattcttagtgaaattaacctaaaaaaatcactcgatgagcgggttttgattaccacactgaccaaacgcatggcagaggatttgaccagctatttaaaagaatacggtattaaggttgcctatttacactctgatattgacacagttgagcgaatgaaaatcattcatgagctgcgtacgggtatttttgatgttttggtaggtatcaatttgctgcgtgaaggattggatatgcctgaggtttctttggtggcaatttttgatgccgacaaagaaggatttttacgctcagaacggtcgctgattcaaaccattgggcgtgctgctcgccatgtgaatggcaaggcaattttatatgcagatacaatcacgccaagcatgcaaaaagccatcgatgaaaccgaacgccgccgtgccaaacaaattgcatttaatcaagaacatggcatcacaccaaaatcagccagtcgtgccattaccgataagattgataccggtgatgacgaaacttctgaagtggtgcagattgttttatctcaagcattggcaggcgtggatgaaaacatcctacattcgccaaaactactggccaaagaaatcgctcgcttagaaaaacaaatgcaggcattatctcgtgagctaaaatttgaagaggctgccaaagtgcgtgatacagtcatcgcactcaaagagctgttagttcaataaaattgatcaaatcaatttatcacaacaatgcctttactgtttaatgatcaagtaaaggcaaattttatgtttaatcagcttatgacaatccaaacaattcatagacaccctttgccaccattcacaccacccaatgcatgtgtcatgatgcttggcagctttccgccaccgcctgagcgttgggcaatgccattttattatccaaattataataatgatatgtggcgtattttgggtttggtattttttgatgatgctaagcgatttattgatagcacgaataaaacctttgatcaagatgctattgagcaatttttgactaagacgggcatcgccatcggcgacacagccgaacaggtgatccgccaaaaagacaacgcttctgatcagtttttacagattgtcacaccagcagatattgaaaagacgctcaagcagttgccttggtgccatgcattcatcaccacaggcaaaaaagcgactgaagttttatgtcagcaatttacaagccaaaaaataccaaacattggcgagcaagtacagctattgattgccaaccgtcgcattgatttatatcgcttaccatcatcatcacgggcgtatcctttggcgattgataaaaaagccgatttttatcgaaaggtttttgagacattgggcgtgctttaaaaagtacaacgatttaagtgtatttttgctaaaataccaagatcttcgcaataagataccgcaatgactgataccatcttaacgataccgccaacaccgcccaaaccctctgaacaaattgccgccttacaatgcacgcttgagcaggcttatttgattgaagcttcggcaggtacaggcaaaacttggacgctgacggggattattctacggctattaattgaaaaaaaatatccacctgagcgtattattgccacaacttttactcgggcggcggcagctgagatgcaagagcgtatcagtgagcggctgcacagcttttatggcttgatgcgttggttgcaaggtatgctaagcactcagcctgaatggtttaatcagactgcacccatagagcaaattattacttatgccgatcaggctgggtatgatgccgccgatccaattaatgagcatttactcagatttatcctatctcaaaaagcaaccttcttaaacgaagtggtttatcgcacagggcttttattaacttctttagataaactatttgttggtacgctagatagccttgctcaaaaatggctcaatgaatttgccgcccaaattgggcatcagtctggcatggagattttaaataatgccgaacaaaaagttgccgccatcgtccatgatgagatgcgtgccgaagaagttaggcttaagcacgcccagcctgaattttatcaaatctttaaagcattttatccaaattttttcagccaagtggatgctgttgtcaagattgttaataaagcgattaatttttattctgcacccattgacgagcttatgcctattaatacagacataagcttggtcaaagcgatgattgatcaaattataacaacagattttacaggatttacaccatattttgacgccaattttcgcaaacaagtagcaatgaatcagagtttaggctttggcaaactgattcaatatctgccaaatttgctgtctttaatccaaaaacacggcgtgctatttgttcgttttgtggataatgatgcacttaagctgattgatgcaatcataaaagcaatggataaagattggcaaatttttaataaaagtgccaacccaagcgatatcaatcaatttttggcgttgccacttcaggctctcagcgatattgccaatgtttatttgacgctaagtgaacaaaccaatctataccatacgcacatctgccgacacattatcctaagtgcaaaaagtcagattgcccaaaggcttgagacacatggtcagaccacatttacgctacaaatggtaagattaaatgaggcacttcgtaatagtcctgcactggcacggcagattcgccatcattatcctgtcgctttgattgatgaatctcaggatattaatgggctacaagttgagctgattgagctggtttatctcaatgagattgccaattatcacaaaaatcttatccgctatgagcaaatcggtggcgagaagccaaaactgccacggggatttttattgttagttggagatcctaagcaggcaatttatcgctttcgtggtggcgatgttaccaattataatttaattaagcattatggcaaccaagatttgctcatcaaagcaccattgatgaatcaatcgctgtctttgacggtcaatcgccgttcaagcaaagcactgattgaggcactcaatgcatggtttgacaataatcatcaagatgctgtcgccaatcatgccaatttaggtcaagggattttttatcagcagatccaagcacataaagacggtggcggtatccattggcaatctgatgcttatgccgattattatggtaaatatcccatagcggtgttgcattttgaccatatcgaagctggtcaaaaagctgcacaaagggctgagcaaattgctcggcatatcaataccattttgcaaggtgatcatacgctacatggtcaaaagatactgccaaaggatattgctgtacttggacgcacagctgatacgctagataggataaaaagtgaacttgatcagctcaatatcccagccatcattcccaaagagatgaatatctttatcactcaagctgcagatgatcttttggcgttaattggtgcgatactacaaccaaatcacagcgaaaacttgggtaaatttttggtatcaagcttggttggcatgacgcttaagcaagcaataaatatcattgaaccaaatgatcagcaggctttggataatgacttatcagaaactcaaaatctaaaaactcatcttttagcctacctaaaaaaatcatatgaaaaatggcaaaaatttggtgtatcatcagcacttgcttatgcgcttcaccattcgcccattgattatgatgatgacaaatcgccttggcttaaggcagccactcaaggcgagcgttatttggtggaccttgaacggctggtggctttggtcagtgagcaatcgcagctgcacgagatgcgtatcattgcttggtatcataaacagatgaacgctgatgttgatagccacaataagcgtcccattctaccgagcgaaagcggtgttaatttgatgaccattcataaatcaaaagggcttgaattccccatcgtgtatgtcataggcatggatgaaaagccaaaaaatgagaatgggctgacaatctacccttatactaatcacaattttcagcggtgcttaagcttaagccaaggtaatttgattgatgaaaattattattatcatatcaatcagcaggagttgattgatgaaatcagacgcttaggctatgtggcattgacgcgtgcttctgaacagctatatatcgtgggtggtgatttatccaaaaaaacttcaaaagaaatgcctttgtatcaatggcttgactgtgcaggtgaaaaaatactgagcctaccagatcggctaaaaggttgggtggactggatagatctgactgaagcggatttatttagccaaccttatcaaaccaagctgcccaatcttagcgccaaacattatgcaccttgggatatggtgatgaccaaaacccagttttttggagaatataagaccagctttagtgcattaattactcgcttggataagtctgccatttctcctgatgaagcagatattgatcagttgtctgtactgactgacatggccgcatctgatcagtttgatgacattcgtaccagcttttttaagggcagtttggctggtgattttttgcataaagtcatgcaatttttaccgacagatcgactggcattggcatctttgcacgatgctcatcgtatcatcagcggggtgatttatgaacaaggcagaaaacttgggattgctgagcgttatttacccactcgccccgctcagcagattggtacacgcatcaattctaacgagcatcaagccgatgatcataccaagttggttgcttggatttatcagcttgcatacgcaccttttagagcatctcatcgctcattaatgtctctgccaatgactgtacaactgcgtgagcttagctttacactggggcttggcgatacctttagtatcactcgcctaaatgaggtgtttaaagcacatagcgacaaagacttggtattgcttgacgatgactatcataccatgcgttatcgttatttacgaggtgagattgatttggtttatgagtgcgataggcgattttttatcgttgattataaatcaaattatttgggtagcacgcctgatgagtatcatgatcacgccatggctgcagtgatggataaggtcggctattggctacaagctgctatttatcaagtggcattgcatcgacttttaaagattcgattaaaagactatgttggcaatgaagcagcttatttgggtgctgttgaatatgtctttttgcgtggcgttcaagagggcaatgagaagacagggcatttatgttggcagccgccattatctttgattttagcacttgatgagattttataagttaaacttaacgattaatagtagagataatatatggcaggggatattattagccgatatgtgaccgatcgcattcaagacaatcatcaatggtatgccaaaaaacaggttttggctgctgaatgtacactaagattaccagactttgagctatatcatatcgtgcaggatgcgttattatttcagctcaatcaagggcataccatactgcatatcaatgatcatgatgatttgaataatcgccatggattaaatggcatgatacccatttggcaacaaaaaatcatggattcatgcctgacagtgataacgcacgcattggcaaatgagggcatggactgggcagcattttttgatgcttatcatcgctgtgcagatgatactatcaagataaaacaatttgttaatcatgccttaaatcattttcgtcagcaagtatctttgcttgatcacacagtgatggaaattgagcaattatctgcgttatttttgtccatgctgcgtatttactatgtcttatacaaaaatgccaatactttgaatcagtttgtgagtcttttgcataacaatactttttttggagatattttggcatcaaacattcaaagcataccaacaaatacgccaccgatttattttagtgatcaagcaggtggactgtatttatggacaagtcgtgcctaccttgctgaatcacaactgatgacgcatatcttgcgtatcagtcaggctgatgtgccgatatttgctcttgatcagctaccaaatagcctaaataccgagcagcgtgacgcaatcaagctggtctcaaaacaagcgttttgcctaattacgggaggtcctgggacaggcaagacctttacagttgcccaaattgtcatcgcactcaatcagcgtgatgagtataaaaagatgcgtttggggcttgctgcaccgacaggtaaggcagctcagcgtatgagtgaatctttgcttaaatccctagataaggcgaacgatatacagctgcccaagcctaagaccattcaccgcctgcttggtattggggcaaatggcagcccacgctatgatgccaaaaatcagctgccgcttgatatgcttattatcgatgaagcttctatgcttggcacggagctggcaagtcagctatttgctgccatcgccacgggttgccgtgtgattttacttggggatacgcatcagctggctgcggttgatgctggtgcggtgttggctgacttatgccgaattgaacgcctaaggcatttgcgtgtcaatttgacagcatcaaaacgctttacggacacatcaggtgttggtcaattggcaaagctgattaatgatgatcgtcaaaatatacactttgatgaaatacaacaattaatcaattgccataccaagattgattttcatcccatcacccatgccctaatgcacaatgatacctaccaaaagcttagccaagactatcaggactattttttagcaagtaaacggcttcgctttagttttgcaaaattatctagccaagatgcaattgatagcgtcaaaaaactatttaagatattagatacttaccgtattctttgcgcttcacatcttggtacatttggcgatgatcagatcaatgattatttaagcttagctcatcgagcagttcaaaaaatcccaccatcagtatcgccttggtttcatggtcgtgtggtgatgattaccaaaaatttatatgatttgggcttatttaatggagatatcggcatttgcttatggggttcatcaggtcttagcgtgtactttgaaggcgagactttgcgtatggtggcggttgatatgttaagtgataccgttgtgagtacggcttatgccatcacagtgcataaatcccaaggttcagagtggcaaaaagtcgccattatctttgatggcaatagcgaacgcctgctgtcaaaggagcttatttataccgctgttactcgagcaaagtcagcggtacatatctacagcacgcatgacgcactcatcaatgccatcaatacgccgacagttcgacaaactgggctggataaagtgagtgatggtcagcaatcataatcacttgatcttgccatgtttaaaaatacaaattttattccaaatatgccataaattataaaattatgtcataatacaaagttttaaagtgatatttcaaaatacaagtatatgacacaatgatgacagataataagctacaaaaatcccttaaaaatcaacatattttatcacagcccctatctattgggggtttaaaaattgagaatagaatttgggtagcaccgatggcaggggtgacggataacccttttcgaaggctctgtaaatcctttggtgcaggtcatgccgtcagtgagatgattattgctgatacagcattatatgcacgcaaaaaatcgttatatcgagccaattttgatggcgaaattgcacccatttctgcacaaattgcaggggctgagcctgataaattggcacaagccgcccaatttcaagttgccaatggtgctcagattgtcgatattaatatgggctgtcctgccaaaaaagtctgccgtaagctcgcaggctcggcattgcttcaggatgaagatttggttaggcggctgcttgacagtgcggttttggccgttgatgtgccagtcactttaaaaactcgtttgggatttgccaatgggcaagaaaatattttaaaaattgcacaaattgctgaacaagcaggcgtggctgccattaccattcatgggcgtacacgagaggatttttatacaggtcaggcacgctatgagctgattacccaagtaaaaaaggctgccaaaatccctatcattgtcaatggcgatatcgatagcccacaaaaagctttggatatccaagccaaaacaggggcagatgctgttatgattggtcgagctgctcaaggtaaaccttggctgtttcagcaaattgcccattttgccaatactggcgaactcttagcgtcgcctacggtcggtgagattcatgaagtggtcttgaggcatctagatgagctgtatcgcttttatggagaatattcaggatgtcgcattgcccgtaagcacatcgcatggtatacaggcggtctgcccaactctaacgcttttcgtgacgccatgtatgcgtgcgagactaccaaagagcagtttgaggtcgtggataaattttttaagacaatttcttaacaatttcttaagtgtttttgtgtgtactgatatctttgatgactgcactgactgtcccatctttaaaggttatcttaactgactgattttgttggagtgttttggtgctatgaatactttcattggtctgagcattatgaatgagtgtatagcctttttttagcattcggcttggatgctgaattaaaatcaaactttgtaaatggcgacagtctttttttagtttagataaataatcaaatagaatattatgctgatcaaggtggatttttgtggtatgtttggcttgcgatataatcgccaaacttgatttttgggtctgagcaagtagggcggttagagccgatttttcttggtgatggcggaattttgcggtactttttatgtggcttagttgatataaattgtctttttttgccatattgacggcgtgcaaactgcttctttggattttctcaatttgtctttggctatttgcttgggccattgttagatgagtattggtcattttagtcaaacgctccattgtagcgaccgcttgacgcgtcattttgaccaaatgcgactcaataccaaggatagcttttgatggggtatcaaaactgctatgtgctacctcatcaagaattaccgagtcacgctcatgcccaataccaacccaaacaggaatcggacattctgccaccaaagccgctaattcaaaatcattcaaataagccaaatcgccaaccgcacccccaccacgaataatgaccaacaaatctggcaaagtatcataggtatttttaaaattattcataccctcagaaattgcaaggcgtatctcattgggcgcatgattgccttgaaaagtggcataatgatagtgaaattggcaagcacctgccaaggcgagccgatcggcttcggcacgaaagtcgcctaaacctgccgccttttcaggggcgattacgatgacatggcgaatatcaaatggtatggcgtgttttttatttaaatgaagcaggccttcttcgctcagccgttttttcatctgtgtatatgcagcagcgatctcgccgagcgtataatttgggtcaatatcgctaatgtttaggctaaaaccataattggcatgaaaactcgccgagcattttaccaagaccaaaatacctgcttgtaggctttgacctgtcattttggtaaatttactcatcactgtcttggcacgaaatcgccataaagttgcacggcagcttgcggtaatctgatcggcatcatcagtctcagctaattcgaaataataatgaccgcctttagtgttcatggcacggatttcagcacgcacccaaacctcatgatcaaaactgtcatcaatcaccattttgactgctgtcaaataatccgataaagacaaatgagcatctgccaaattattaaaattctcatcaaaaactgcttctttggcaagcttcgcttcaaaactttcggcaatttgacgatgtttatttaatagcgtttcagggtcatcaagggtgctgcccagtgcttcaacatgctttatagtggtgttttttggcataattttggcataattttggtgagatactattgtagcaaagccaagcaaaattggcaattttgggtcaatcaggcgtttttatacacttaatctaaattaaaatcacccaaatgaatttgagcgatcataggccaaaagagttatttggttgttgtggtttttctgggtaattaagtgctgacagtcaagtctgtgcgttcatccatctcatacaatgcacctgcacgaccaacgattaaaggatcgatattaccaatttgagcgatgtctttattttcgtaggttaatttattgagtacataacgcatggcgtttaagcgtgcgcgtgttttacagtcagatttaatcacaatccaaggcacttctgccgtgtcagtattaaagaacatagcttctttggcaagtgtataatcgtcccatttattgagcgaggctttatccactggcgatagtttccactgttttaacgggtcattttcacggctggcaaaacgcacacgctgttcttcacgactgaccgaaaaccaaaatttcaccaaatgaatgccagattctaccaaatgcttttcaaattcaggcacttgatgcataaaaatacggtattcttcatccgtacaaaagcccataactcgttctacaaccgcacgattgtaccaagagcggtcaaataaaacgatttcaccagcggttggcagatgctgcacatagcgttgaaaataccactgaccacgctcttgttcggttggcttttctagagcgaccacacgagcaccacggggatttaaatgctccataaatcgcttaatggtgccacctttgcctgcagcatcacgcccttcaaagataatgacaagtttttgaccagtggttttgatatgatgttggagttttaacagttcaatttgtagcttgtatttttgggcttcgtaatttttacgacttaagcgatatttatatggataaccgccttcacgccaattatccgaaagctgagtatctcgtgatttatcggtacgaacttggctgatgacatgagttgtgggaaggtattctttgagcgcttcaccaaattctgccaactcctcaggggtagcatgctcaagtaactcttctaattgacccaccgtttgtgtcataatcgcttccgcttttgatggctttggcttggtttctgtagcggtcgatactttggtacgagtcgatgttgtttttttgggaacggttgtggcagtcgttgagcttgttgtcgccgtcttaggttttggggtggttgtcataagaattccttagataaacaaataaaaacaacaaaaaaccttgctattagtatgttatcatgttaatgatatgttatcaactgttaagcaatttgtaatatcggctgaccataccgccataatttatcataacatatgccaaaatatgactaaacgtgctttggtttttatcatctaaaccatcaaatcattatttaacgaaaaaaattgattaaaagtattgacagcgataaaaatatcagtataataagcactcatagccagttaggctaaccatacatgccagtgtggtgaaattggtagacacgacggattcaaaatccgttgcccttaaaagcgtgtcggttcgagtccgaccactggtaccaataaaataaaagacctacagcaaaagttgtaggtcttttaatagctaaaaataataataaccacatactatgtttggcattaaactgttacattctgatgattttataaaatcggcgtcatcgtctggttgttttcttgccatcatagacaaacaaaccaacaaaaaccatgtgtacaatcttagcactcaggtacaaagatttgagctcattgacatcgatcaggtggcaaatttggcaaattcggttcaaaatggtgccatcagtgccactgttggcacgctgcttgttagggcgggcgttttgcctgcactggttgccctgtctattggtgctgggctacccaatcgtaccaaagacgcttatgtttgtcatattgagtttgacaatggcaaatctgccattttacaattaagcaagcacaaatatcagcagtttttaaaacacatcgcttaacgacccaatcacgaccaaaacccacccaatgcggtgggttttttttacttaaaggatgacaacatggcactggcaattaacattgtgcttggagcaaatacggttcattttagccgtaacatccaaaaagccacccaaaacgccaaaaaatacctacaaggctttgccttacttgcctacatgcaagcggcggataaagacaaatctggtgcaggattttctcatcattgacccaaaccccatgacggacgaacaaaaaagcctttactaagcgctttgtaaatgagattaagcagtctctaagtcgtgggcgaacagacgcttaggaaatttttaccaaaagcagtaagtttaataatgcctttttgtatctcaatcttggattccaaacctttcatcacctgatcaagtttttcagatcgctcatctttgtttagaatcttgccttcgaattcaattttcaagtcgggattttgaagtatggagatatctaggtttagagcctcatgctccttgtttaacgctgaagtcatttcttgatagggtgctgaatgataaaaagactcgtattctgaatcatctgtcaaataatcattgtatgttatatcgattaatttaaggcgtgatagattatcaatcgatggcgctatcagatcctgatctgatacttcaggattgcccaaaaatacatgctgataaagcatatgatagctgttactttcttgcctgataatattcgcaattggcgatatattcttggcactatcttggtttaagtattttaaatttttagcatctaacgggctgagtgatttgataatctctacaaacgcatgatgcatctgcccatcttttctctcatccatggctgacacaatcaaattggcaaacatttcgcgaatgttctcttcgttcatatgaaatcggctggcttccaacgctgggccgataattgccacattggggtctttgagtgcatttgctggtattttttcaataccggtctgaatgttgttctgcatggcttgtatattcattgcttgttgagccttaatgctttcaactttataatgccacttgtgaccatataccacaaaccaaatatcttgcaaggtttgcaaaggtccatttagcaaaccaactgatgcagcgccactcacagcacctgtgatagctggtattaaatgaaaggtttctgctgtcacggctattactcctaaattttcttcaatatgcgtttggtgatcttaaattcattaccaccgctcaagacggctgacactccacacccagccaatcacttcaaactcaccatcgctgatctgctgcttggtggcgacctgctcaggaaattcagcggcattatcgctgacgatacgcacgccaccatcaggcagtcggtacagacgcttacataagcacagctccccaaagcgaatcgcaaaaatccgcccatctttgacttcttttcgtcctttatcgatatagatggtgtcgccatcttgtacatagggcgtcatactgtcatcgcacgcagtgacagcataggcattgatgggcatcacacctagattgctcaaggtgcgtctgcccatgcgcagcttacgaccctcaagcggtgcatcaccattgactgcaccatgcccacaagcaaaggcaatgtctttataaaaagggatctcagcttcatcatcatccagtggggtgctatcgtcccattcagtgataggggtgagtttatcattattttttgtcatctcaccttcgccgtaatcaagccaagttataggtacaccaagacattgcgtaagcagtttcattttgtcgtttcttggcttggcttgacctttggaataacggcgtatcattttaggaaattgatcagccttggctcgctcacttggcatcacgccttgggcattgagtaaatgagataaaaacaatccgccaaggggtagatgcttagctattgagcaagcgacaggcggtaaggtaaaagcggaagacttgcgtcctgatattaattgggaatatgtcagagaacaacaaaaaaacccctagttatcgctaggggcggtatccattttcggattaacttaaggaaagttaaatgaacgaatttattataccaaactctaattctgtgagcaatgattttaattattcaagaacagatttagacgcccaagagcaacaaatcgctgaatttatcaaaaaaggtggcaaagtcatcaatcttgacaattccgaacagccaaagaaaaaatcagcaaaaaagcgtgattttaacaaccaaaggataaatagcaaaatgcaccttgttttgtgctatctaaaaaggtcaggtaagcgtatgactggcttacaaattcaagaaaaatcggcatatcggcaacaactttaggtagtcaaacaaggctactgaacgcacaagcaagcaaacagtacaatcaaaacagcaacccaagcagaaaatgaaacatcagcacagcacagccaagcatctttatgtgttgccaatattaacgaaggctttttatcactattaaactggtgcaatagatacacaggggcaaagcatccaccgaaatttgttattagacagcaatttagccaacatgcggttgatattggcttattaacacagctatcaggtttaattgacgcaggcaagctgcctaaatctgtactgtatgataaagcccgtgagtttaatttaatcagtggcgagcttagcaatgatgaaatagatggcttaattgaacaaccgagcatgacttatgaagcatttaatcaatttagaaaggttcaaggttcatctggcaaataagtttaaaaccacacttaatgaaattaatgagtttttacaattggtggtatttcgtcatgaaattagtgagcttaactataaagaatttgagttattaattggcgagagtaagcagaagctcttgggctttttggcaggttacgccttggagttaacccaagattggcaagagctatacgattacagctatacgcttgaaaccaaaatgattgatgatgataagccagatacgctaaacatgaatgagccacaatttgacgcagacagccccatcaagctatctgctcaggttggtgtaacgcttaatcagattttggctaagtttggtgatgaacaaagcacaaagataagtaatgccatcagctatgcttatgccaatggcttaccaaaccaagagcttgttaggattatccgaggtacacgcaaaaaccgttaccaagatggcattttggcaatcacaacacgccacgccaagaccattgctcatacaggcacagccattgttgcaaatcaagccaaacagcaatttattcatgataacaaagacatcatcaaaggcattaaaatacttgcaaccttggatttacgcaccagcagcatttgtaggggtttagatggggtgtttatgcctttggacaaagcacgatatccgccctatcattttaattgccgttcaagttttgagattgtctatgatggctatcaaacgcccaaacagcgagcgagcatggatggggttgttaaaaaccaaagctattatgaatggctaaaaaatcagcctgcccaatatcaagatgaagtgcttggcaaaacccgagcgaagttatttcgtgatggtggcatgacagtagagcggtttagggcgttacagcttgataagaactttacaccgctaaccctagatgagattaaggcccaattatagggcttttttgttgcccaaggttggaaaacaagggtgttttgtgctggatagcacgcaaatggagacaaacatgcaattaaaaactgatgaaaacggctatgcgattgtacaagatggtaagcctatttatgtacatgatgatggacaagaaattgcctttgatgcacaagcaacaatgacaaagataagccagcttaactcagaagctaaaaaccatcgtgaagaaaagcaaaaggcacaatccttattgaaatcttttgatggtttggacgctgatgaagcaagacgagcattagagctggtgaaaaatcttgatgataaaaggttaattgacgcaggcgaagttgaaaaggtaaaatcggaagctagaaaagccttagatgaacagcttgcccaaaaagacgcccaaatcaaaaagattaatgatgactaccgaagtgcggttattggcggtgagtttgctcgttcaagttttatcaaggataagaccttgctaccgcctgatattgcccaaaatgcgtttgggcgacattttgatatggtagatggtaaagtggttggttacttaaatggcgaaccaatttactcacgcaccaacatgggtgagcttgctaattttgatgaagcttttgagaccattattaaccattatccaagtaaaagcgatattttgcgtggttcgggggcaagtggtgcaggtgttaaacagccgttggcacaggcaggcacgacaaacttaaagcgtagccaaatgtcacttgagcaaaagtccgctttcatcaaagaacatgggcaaacagcctatttaaatttaggagcttaatttatggcgataacaaccaataacgatgtacttatttacaatgagcttgctcaaaccgcttatcttgaacgcttacaagagaatttggcggtatttaacaaagcgtccaataacgctattttgttaagtgatgagaacctacaaggtgatttcaccaaagagtctttttataagattgcaggcgagattgaacaccgagatgttaacagcactagcgttgtacaagccaaaaagattgccatggcggagcgagtgggcgtcaaagtaccttttaagtttgggccttatgaaaccaccgaagaagcgtttaaacgccgtgcacgcagtgtagatgagttttctttactgctcgggcaagactatgccgatgctttaatggcaggttattggaaatatgccaccgcagcactacaaggggcggtaggctcaaattcatccatgttggtaacggctaagttgtcagagcatgggcgaaaagtcattacccaaggtatgagaaagtttggtgataagttttctaacctatccttgcttgtgatggacgcagcgagctactttgatattgtataccgataaactgtatcaagaagccagtaccgtggtttatggcggtgcacctggtacgatgggtattcctgttttggtaaccgaccaagctaaaaaagatactatttttggcttacaacaaggggcaattcgtatcagaaatagccaattacctgcttttagagtgtatcaagacaataccaaagaaaacctagtgattggcgtacgagctgaaggagcgtttaaccttaatgtcttgggatacagctataaagatacggcaggggctaatccgaacttggcaaccttgggggcaacagccaattgggaaaaatacgcaacgagcgacaaaaacacggcaggcgtgattttaaacattgcggagggttgatatgttagtttatagcaagcagggtaaaaaagtcttgggggttgatggtgaataccgaaaccctgaatactttgaaaaaacagagcaaacagatgctgttacggctattggcgattatccgcacattgagctggcttaccaagcaattggcgtaaatgtcattcgcttgggtgttgatgacacgcctgccgttaatgatgatggtgaacaaaccaaagctaaatcacgcagaacgccaaaggcggtagtatgaaacaagaccccatctgttttaggtggggtttttaggatgaaacaatgataacacttgatgatttaacagacattgataaggctgatgaacaaaccgtggttattgtcaatgcgtggctaaataagcataagttaataccatttaaaaccataccagagccgataaagcaggcaggcagatacattgccaaagcgtggcttgatggggatttgtttgccacacgcaccgaaggacaggtcatctcaaagtcatcaaaggcaggtgatgtgtctgtttcaaaaacctatgcagatggacagatggggcaggctatgagccaaaacgagcaaatcgctttagcacttattgagccgtatttacaacagcctttgggaatgtttggcttgcctttggttagggtgtgaaatggggttaaaagctgaaattagtactgaaattacccaagcctttgatactgatttaaaagatgctgtcaaagacttcacaggcaggcgtgtcatcttatctgatgatgattgggcggttaatgatacccaagtactatctaccatcaattacagcggta

SEQ ID NO: 41 - DNA, 269223 bp, Moraxella catarrhalis
attaggtatggttctttaagcaggaaattggtttcagccattcaacccatttcaccgaacttaggctagataaattgctaaatttatttggtcatcatacatatcatagatgatggttttgcctgtcgttgtgggcaatgattatatcaaaattaccaacgattgcaagcgattttgataaaaatatgaaaaaattttgtaatttttaccaaaatcttagaaaattcgcccaatttatcaaaaatttgctaccatattcaatgattaattataatcatgagagatgagccatgcaagtccatcaaatgcgaccgacagtattatgtttttcaggactggacccatcaggcggtgcaggtatccaagctgatattgaatcaattggtgcttcaggtgctcacgccgccattgcctgtactgccctaaccatacaaaattctcaaaaagtatttggctttgaacctgtttgtcatcagctgctaaaggcacaagcgcaagcgatgctagacgacttgcctgtgcgtgccatcaaatctggcatgatgggaacgcttgagaatatcattgccttgaccgaattgttcgaaacttgtaccatcaaacacatcccttatgttttggatcctgttttggttgccaattcaggtggtattttgggcgatgtgaaaactttagcccaagcctttagccgtctattgccctacgcaacgctcatcacgccaaatactcacgaaatccgagcattgagtgggcaacaagatttacatgatgctgccaaagcattaaatgaccaaggtgcaaacgctgtactggtcaaaacctcgcatgattttaatacaggtgatattgaacaatttttatacataaatggacgcatccatcataccagcattgtacctagattgactggtgaatttcatggatcaggatgctcattagccagccatattgcagggcgtttggcgatgggcgatgacatcattgacgccattacagcggccgatgcttggattcaccaaacacttatccatgccgacaaacctcatcaatctgataatacccagcttatcccaaatcgttttatttaaccaacccaatgcttagccaaaataaaaacagggcaatttgccctgtctgaaatcccctaatttatccgccccaaatgtagctgccaataatgccaataaaattttcaagcagcaacaaactaaatagtgctgccaaaaatgataaatcaatcatgccaagattggggacaaaacggcgaaatggtgcgactatcggctcgggtaactgcatcaagacaaacatcacactattattaatatttaaaaatacaacaagcaaactactgattgctgatgcaatcatggtatagcgaagcagttgtaaaaatttcatgataccgcttaaagaaccaataaaaaacagctcaatggcagtcatggatctacccaagatgatggtattagcggcaatgttaataaaatacaaaagcaacatcaaaaccacagccgctagactgatacgccctttacccatcgttgggaaaatgcgtgcaaacacatccaccacgccagtcaagcgataagctgctcgtgctatcggcatgttggtatcaatttgggctaattgaatcatgaaacgcacaaatataagcatcaaagcaaagttgatgaccatattgattaaaacaaaagacatggagttcataatataaatccatcatggataaaattgacgacggtttagtccgcttggctgaatgtttgcccaagctcaaagctgcggtcactacatgcctgcatagcacgggcaaaagcatcgcccacattatcatgatataagctatcaagtgcagcagcggtcgtaccccccttagaagttacctgctcacgcaaaacggcagggttattttcttcggccaatgctgctgccccccgcatactttgtaccgctaaagtctgtgcatcttctggtgataaccccatttctaccgccttggcaatcatattttcaagcacataaaaaaagtaagcgggtgctgaacctgccactgctgttacggcatgtaacaaggattcatcttccacccaagacaccttacctgaagcttgcatgatattttgggtcattaaacgcacctcatcactcacatcaaaagcataaagtccagatgcaccaaagcccttactggcaggtaggtttggcatacagcgtacgattttatcgtagccacccagcatatgtgataacgcctgaatcgacagccccgctgcgatggataaaacggtttgttgctgcaaataaggtgctatactgccagcaacttgatgcataatttgtggcttgactgccaaaaccaaaacatcagcaccctcaataatctgatgggcattatcaggattggttgctatcaaccctttatcacgaaatttggcttgtttatcgtcatcgctgtctgagacgcacaatgtcaatgccaaattatgctgattttttgcttgcaaaagaccatcaataatcgcatgtgccatattgccgccaccaatgaaactgatggttttaccattaagcatactaaaatctgtcataagttttctccgtaattttttagggctgagtgattttatcttacaatcataccaataaaaaccaccagtaccgttttatcttcaatacatcagtgaaataactcagctaagggttaatttcaaggattaatcaggtgcattgtacaccattcgccctattggtgcaaaactatccaaacgctgaccactgctcaaatcccacaccatcatcggtgcaatcaaatatggatgaccttgatgattgattttccataagctgtctcttagccaaaatggtatgcgtaatttttgagccaattttttgcctttatatctatgtttaccaatgtttatcgtatcggttttggtgattttttggatatcatcaattttagccatcaagataagttgacaacggccatcatcagacaaaatccagccttggctacttggtttggtatgccctgatgtaccaaacaatgcccaaatatctgcacgataacgatataaacagtcatcataacagcacatcacataagccgcctgttcagcttgccacacaagctggctactgtgatcattatcctgtcggcaaatcatctcaataacctgctgggtcaactgatggcttgggggcagtgcttcatctgcctgcaaccagcggtgcagtactaaggcttgctcggattttgataaattaagaaagtctttaatgccaagcacttgctgataaggcatttggttggcaggatgatccaaagatgccagcaaagtccccacttgctgacccaccatggtggacgccatcgatagcaggccagccgaccgaatgatattctcaaccgccttaggattgagcgtcaaaagatgcggcaaaatgtcttggcgaatgcgtccacgagcataagcaggatcggtattggtgatatcatccacataaggcagtgcatgggcgttagcaaattgactgatctgatttctagatatcttaagccaaggtcgccacaaggtgatggttttggctgcctcgtctgtatgcacagttttggcttgccaaactttcatacctgacagtccttgcagtcctgcacccgaaaccagtcgcatcagtactgtttcggcttggtcatttgcatggtgagcaagcatcagtacatcaccttggttcatgaccaggccaaaggcttgatagcgtgcatcacgggcatgcgtctcactattttttgccaaagttatccgtaaaatttgacaatcaaatccatgctcaatcgcccagcgatgaaccaattgcatccaagcatcatttgccgcctgccaaccatgatgtacatgtaatatggtgggcagccttattattttaccttgtctatataacaagaaacatgcataagccaaagccaaggaatccctaccgccactacaagcaagatatagcttagcatgagcaggcaatgccaattcatcaaaagcactcgataagcttgtcaaaatatcatcagtcataagcttcaccaaatccaataaaaaacaaggagcggcttactccttgtttgttatgatgtttatatttatgatagttataataataactttaaatttatagtgatacttttgaattaaactgcatcaaacgctgataccgctgttcaagcagctcatcaattggcaatgcgtgtaattctgccaattgtactgtcaataggttttttagtgctgccatgacaggttcaggtgcttcatgcgcgcccacaccttcactgacaatctcatcaatcagctgcaattgatacaaattggttgcattgagcttgagtgcttctgacgcatcagatgctttttcagccgtcttccataagatagatgcacacccttctggagagatgaccgaataaatgctattttcaagcatattaacccgatctgccacaccaatggcaagcgcaccgcctgaaccaccctcgccgatcactgtcgcaatgattggcgtttttagactggaaaatactgcgatacttttggcgattgcctcagcttgaccccgctcttcggcaccaacaccaggatacgcaccttgagtatcgataaaagtaaacacaggcaaaccaaaacgtccgccaactgtaccaaacgaatgattttacggtagccttcagggtttgccataccaaaattatgggcaatacgctcacgagtgctacggccacgatgttgaccaacaacaagtacaggctgaccattaaatcttgccaacccaccaataatagcacgatcatcagcaaacgctcgatctccatgcaattcatcaaactcatcaaataatgaatcgacataatctaagaataatggtcgctttgcatgtcgtgctaactgtacgctttgccaaacttgactcataggatactcaataaactgtacaaatgtaaactgatatttagtttagcactttttttaggtctcgtcatctgttttatctgaaatttgtgatttttcatcaaatcagctttcattgatttatatttcaatatactcagccagccacctctaatcgcacaccccatttggcaaattgtgccacatcttgttctatatgtagcccctcaccgacggttacctgccaatgatctggtgtgacactatataagtcaagggtggctgccttggtggtgcgactttggctagattgagctgccaatcgcaaaattaagcacagatacaccaatttacacccacctaagttttcaacggtctctcgtgcatcggcttttagtttgcggcggtgatgtcgtgcgatttgggccatcatggcttgacccacttgggaaaaccctgcaatatctgaatactcaagcaaatatgcactatgacgctgataattgctatgcccaactgccaaaccaatttcatataaattggctgtgcggcgtaataaatcagcatcttcatcatctaaacccaacgcctctttcacatgatgaaataatctggcagcgcgtgccatcacccgccctgcttgtttggtatccaccgaataccgctgtgccattgctgctactgaacgatcacgcacatcttctgaatttagccgacccagcatatcatacatcaccccctctctgagtgcgccgtctgaatagccaagttcatcaatctttaaagtttgcataatctcaagcagctgtgccacacctgcaggaaaaacagcttgtcgatgcgctttaacaccatcaaaatcaatcttatcaacactgccaagcttaatcagatgcttttttagcttttgcatactttggattgtgatgctctcaacgccaaatccaagctccgctaaggacagcctcgcagctttaatcgtacctgatgagccaatcgcattatcccaaccaactttttgatagcgttttgcaatcgtcaaaagctcagagcgtgtgtgcttggcagctttatcaaaggcacgctcggtgattttaccatcaccaaaaaattttttggtataagatacacagcccatttgcaaagattccatctcgattggctcaaatccttgtccgatgataaactctgttgaaccaccgccaatatcaatcacaaggcgtttatccgtactggcattagaatgcgaaacacccaaataaatcaaacgagcttcctcacgacctgagataatctcaatcggctttggtaaaatctcattggcatactgtataaattcggccgcattgaccgctttacgaagggcattggtagcaacaatacgcagtcgacttggctgcacctcggtgatatgctgagcaaatcgatgcaaacactcaataccccgttgcatcacctctttggacaactgattattatcatccaaacctgctgccaactggactttttcggaaatggaagcaacttttcgcacctcgccatgatctaagcgtccaattgccaagtgaaaactgtttgaacccaaatcaatcgcaccaagcaactcatcacgactgatggcagcagcatggatggcgttggcaatttgttggtggcgatggtcatcatctaaaatggctgattgcatggcaaatccttggataacatttttgataaatggggttattttacgacagatggcggcttttatccatcggttttgctaagctttacaaatgcttggctgggctttatgtcaatttgatactgttttgggtaaccactctgccgtttttggcaacaactgtgccatatcatctgccacgggtgcaacaaaattttgtgggcgtgtgacagtgtgtccatcatcattcgtcatacccaactgccaagcgtgtaagcacaaacgcccaactttgggtgctaaaggattgttttgatatttatcatcaccaagcagtgcatgcccaatgtgtgccatatgcacccgaatctgatgtgtgcgtcccgtggcaggcatggcaagtaccaaactgacaggacaaccatcttttttaaatcgtaataaagttttgattttggttaggcttgctttggcatattcaccagccttttgctcgtttaaatgggcaactttgacacggcgttccccattagccaatgtataacgcagtaacggcacatcaataaccatttcatcagcctgaacatgacccatcaccaagcataaataccgcttctgtatcgtttttttgcgaaattgctcttgaaggatttttagggtgctgcgttttttggcaatcagtagcagccctgaggtgtctttatcaatccgatgaattagctcaaggtattttttacccatagccaaacgcatcgcctcaatgatgccaaagctctcacctgaaccgccatgcactgccataccatgtggcttatttaatacaatcaatccatcatcttcaaaaataatacgctcaagcagccctttggcaagctcttcactgataattggtgcttcacgcacgctcaagcgaatgggcgcaacacgcaccacatcgcccatatacagcttatcgtgtgccttgcaccgtttgccattaatacgaatctcatcactgcgaatcagtttataaagatgtgagcgaggtagacctttaagccttgccaataaaaagttatccactcgctgaccatcttgattattcgtcaccgtcaaaaaattcactcggctaaaatctgtaatagcaaaatcggcagattgttgcacagattgcttggctcttttagattttttgctcaaatcgatgggaaaaggctgtttttttgaagttttttgtaaatttttcattgttttgacattttttagtaggcgtttggcaaaagttttggtatagtttatcatgttgcaacgaaattttaggataatttttattttgacaaagatttatccgatattcattttggcaaaaattgtggcaaatttgcgatgactttgtcatctaagaatgtatcaattgaaagttatctatacaatgtaccactaagtacattcgtgtgttttcatcacctaaattaagttttaatgataaaactttgatggtaagcttacatttattcttgaggctttcatcaagcatcaaacatgctctgatatcagccatatcagcaaaaataccatctcaatacggatgaatttttgctaaaacaagattttgccatttttgatgccattttctatgcaacgaccaaacaacattgaccaagcaaatttttaaacttttgcctactactgttgcgatgcaacttcggtattgataccgtacaagattttgccaaccaccaatccgtggtggcgtaattttgggaactgttggttcaaaagcacaagacaaactctgcttttgcaaaacaatccccaacaaagcccaaagaacattgagtttttaaaatcggtgcaagcgatttttatttatccaatcttgtctaaaaaataagtatcattcagattggtatcattttagacaaacaacagacatcaacaatgccaagacggataaatctgtgacaacttaacccatcaagcccaaagaaaaccaagcttgattgataaatcttcgtaaacttgataccgatgttgcttagcctaggcattttgcccataaggaacatcatgaaacgcatcttaattaacgccacacatagtgaagaaattcgtgttgcactgtgcaaagataaccatttatacgactttgacctagaaaatcgtactcgtgaacaaaaaaaagccaatatttataaaggtcatatcactcgtgtagagccttctttggaagctgcatttgttgaatatggctcagcacgccaaggttttttaccactccgagaaatcgcccctgaatacctaaacggcaatactcatgaagacagcattaagcagctcatcaaagaaggtgatgaaatcatcgtccaagttgaaaaagaagagcgtggcaataaaggcgctgccttatccagctttatttcactggcgggcagatatttggtcttgatgccaaacaaccccaaagcaggtggcatcagccgtcaaatctcaggtaaagtccgtgaagaaatgaaacaaatcatcgcagggctaaacctaccaaaaaatatgagcgtgattgttcgcacagcaggacttggtaaaggggctgatgatttacaaaatgaccttgaccatcttttagatatttggaaatccatccaagaacaaaataaaaaacgcccaagcccttgcttggtacatcaagaagcgggcgtggtaactcgtgcggtccgtgactatttgcgtgatgacattggcgaggtttggattgacagtgaaaatgcttatgatgaagctgccaatttcatcaaagctgtcatgccgacccagcttagcaaactgcgtaaatacaccgattatgagccaatgtttgcccgttttggtattgagcgtcaaatcgaaaccgcctatcagcgtgaagtacgcctaccttctggtggttctattgtcattgaccaaactgaagctttggttgctattgatatcaattcatcaaaatccaccaagggctcagatgtcgccgaaaccgcctatcataccaatttagaagctgccgatgagattgctcgccagttgcgtttgcgtgatatgggtggtttgattgtcattgattttattgatatgaacgacccacgccaccaaaaagatgtcgaaaaacgcctcatcgaagcaacacgccatgaccgtgcccgtgttcagttttctgagattagtaaatttggactgatgcagatgagccgacaacgcttgcgtccttctcttgaggaatctacaggctatatttgccctcggtgccacggtaatggcatgattcgagatttgcgttctttatcgctatctatcatgcgacaaattgaacaaattgctctcaaagaacgcatgggcgaaattcaagctgaagtcccaaccgacattgcggcatttttattaaatgaaaaacgagaaagtttggtttatttagagcaagacagcggtgcacgaatcaccattttaccacatgcacatcttgaaagcccaaattttagcctacactttaaccctgatggatttgctccgtcaagctatgaacgcattgctgacaccgaagaaaaagaaaatatcgaccgtggttatgaggtgaattggcaaacagaccacgaaaaatcagactcaaaccgttggcaaaaacctgacaataagcccatcaaaaaaaatacgaccgattcagaacccaagccaaccaaaccagaacctcaagcggttgcatggttgtcaaacttatttgcaccaaaaccacaagcgaaagttgctggcagtttaggtacagcagatgccgctttggcgattgaagcactggtaaatggcggtgcggtaagcctaggtgcagcaggccgtatggcaaatatccaagcaccatcagctgagccaaccccacgcccccaagcagaagataaacgccacaaaaaatctcgaaatgccaaaaaagaatccggcgaagagaccgccgcccaagcccaaccctctgaaaagacagacaaaaaaaccaaaaaagaacgcgacaaagaacagtatccaaagcgtgaagcaggctctcgccgagaatctcgtggtgagattgtgcgtggtgagacacttcataaaaccgaagaaaaagcagaaaaagcggataaagctgataagcccattcgtgccgataagcccaaatctgaaaaaaccgaaaagctaccacatcaaaaagcggccaatcctaaagaagtggtgctacatgtgagcagcattaaagcggctgaaaataatacgcaagtcatccatctttcattggatggcagtaagtctacaaaaccaacaaaagacgaaacatcaagtgccaaagatgatgccaaaattgcacctaaagcaaattccaatcaggcaataaaagcaccaaaagagccgatacctgccaaacccaagcacgaagctgagccgatcacacaatcagatgaatcaggtgagatgagtgcattacatacggtctctgctacgacaggggttgagcccaaactggctgaaaaaattcagacacttgccaaatctatgaataaggctaccaacgaccctagagtggtacaaatcgcccttcagcagacacaggctatcaatctcaatgcaataacagcaggggcgctcatcttgcgtgtcttaggtaaatcggcgacaggtaattttgtgaatgattttatcactgcaatgacaaaaatgtccacgcctgcacagtttgattttgccaactttggttattcaccgctggatacagccacaaaaaatgagtttggtaaactaactcaagcgaccgctcaagcatcagcgccacagggcagaaccgaggctataccacgcccaatcacacgccgtgctgccaatgaccctcgtggtcagcatcctgagtatattgaagcaaccagccctaacaatgatcaggtcagcaaaacaattgctcagcattctaatcaagccagtcctgatacttttgatcatgctgtcacaccagccgacaccaagcataaggaatcaaagatagcgaccgattcttcatccgactcagataacagccaacttagcaaagctgatgatgcggttgaacatcaaaccaatgatgccattgatgctacaacgctggctgcagagcaaatctctgatagcattggcgacaccgtcagtaagacaatggctgatatctcaaccgtcgtatcagaagcggctgatgatactgctaaaatggcagatttggatactcataaccaagtgaaacctgaaagtggtaaagacaaaaaagtcagccaaatcaaagagatcaccgctgaccaaaaaaccgaacgcaagaccaaggcaaatagctataaagatatgattgaaaatgtcgcaggtcagctacaacctcaggttggtattttaaatctgatggcaactaaacctgccaaagtgtccaaaccagccaaaacaagagcacctagaaagccaagcaaaaaaccaaccaaggtagaagtgcgtaagttatctaagcctgtggagccttctgagtcttctcctgctaaatcagcagatgattcagccaacaattaatccacatcaaatatttgcacaaaaaaagcaccatgaatctacatggtgctttttttatattttggtttcaaatgcttaaaacgcatcaacatcagagcgatattttttattgaacatacgcaaaatcacccagtttttagtgcctatttttgtttggtcaaaaaaagatatccatcatttcaaatgctcatttatttggtaattgacagatagtcttaaataatattaagcgtattaatatttaacgccattcaaataccaaaccgcttttcacgactgcatgaaaagtggttttagtcggatgaatggattaatcatcagtcgccttgataaccttttagttttaatcttgccctatgtaatagcggctcggtatagccagatggttcggtcgctcctttaaagataagctcggcggcggtttgaaaggcaatgttgttatcaaaatcagatgacattgggcgataggcggggtcggatgcgttttgttcatcaacaacttttgccatgcgtcttagggcatcccacacctcatcggcggttacgataccgtgaaccagccagttggcgacatgctgagaggagatacgcaaagtggcacggtcttccatcagtcccacatcattgatatcaggcactttggagcaacccacgcccaaatcaacccaacgcaccacataacctaagatgccttggcagttgttttcaagttcacggcgtttttgttctgctgtccaattggtatcggtggcaagagcaatggtcaataaatcatcaagacttggtatggcaaggcgtgccaattcttcttggcgttttgtaacattgcatttgtgataatgaatggcatgaatcaccgccccgcttggcgatggcacccatgcacagcttgccccagcttgtggatgctcaattttggtgcgatacatatcggcaagctcatcaggctttggccacatgcctttaccaatttgagccttaccacgcagtcctgcattaagaccgattaagacattgcgtttttcataggcatgaaaccagatttgctctttaatctcacccttacgcacaaatgcccctgcatgcatggcggtatgaatctcatcgcctgttctgtccataaagcctgtgttaataaaaatcgtccgctcataagcttgggcgatacagttttttaggttggcagaggttctacgctcttcatccatgatgcccatttttaggctatttttgggcaagccaatggctttttcggcacaagagaacagctcggcagcaaacgccacctcttgtgaaccgtgcatttttggcttgacaatatacattgaacctgtgcgagagttacgcaaggtattttcaccacgaatgtcaatggcacagagcatgggcgtgataagtgcatccatcatcccctcaaaaatctcctcgccacccaccaagatggcaggatttgtcatcaaatgccccacattgcgaagcagcatgagtgaacgcccatgcagagtttgggtattgccatttaggtcggtataagtgcggtcagcatttagcgtacgggtgatggttttgccatttttttctaaggtctcagacaaatcacctttcataagacccagccagttgcgatagccctccactttttcttcggcatctaccgccgccacagagtcctccaaatcttgaatggtggtaacggcagattctagcagtatatccttaacccctgctttgtcatctttgccaataatactgtatgggtcaatctggatgatgacatgtaagccgttgttttttaatatgatttcgctcggattgtcaggcacgccattatagcctaccactttattttctgttaaagtgctccaagatttgcccatattggcagataattgaccgtcttttatggcataagatatgacatcagcgtgtgagccgtccacaagcgggaaagtttcatcaagaaaatttttggcaaatgcgatgacctttgccccacgcacaggattatagcccttacctttttcagcaccgtccgtttctgcgatgatatcaaaaccatataacgcatcataaagcgacccccaacgggcattggcggcatttaggcaatagcgggcattacgcacaggcacgacaagctggggccctgccatggtggcaatctcctcatcgacattttcggtggtgatggtaaaatctgcaacctcaggttcaagatagccaatttcgcttaaaaattgcttatacgcacccagctcataaacatgatttttgtgccaatcgtcaatcttggcttgcaatttctcacgatgggcaagcaaggctttattttttggggtcaattcaagcacaacttgctcaaaatttctccaataagtatcactgtcaagtttggcgataggtaaggcttcattttcaataaaatcaaataaaatcttgtcaatagcaagcgagcctttgatgatgcgttgggtggtcataattttatccttaaaatgatttgagatgttggggcatggtctgtactttatatgccaaaataccttgaaacaatctcttgaaacaatgtcttgaaattttaaataaaaacggtgttgtgccttaacagcaaaacaccgtttttttatttgatgggtattaaccgccaaattggttcatggtgttcttacttgcatcgcccgcttttagggcgttttcacctgagaaaatctctttgtggtcatcgccaatgtcagagcctgccatggcttggtgtttcacgcaagcgacaccatcacgaatctctttacgctgcacaccagcgacataggcaagcatgccctcatcgccaaagtagcctttggcaagctcatgggtagataaagcggcagtgtgataagtgggtaatgtgatgagatggtgaaatacgccagcttcacgggcagcatctgcttggaaagtacggattttttcatcagcatcataagcaagctcactgtcatcatattgggcatccatgagcttatcacggtcatagcctgataaatcacgaccttcatccgcccagcggtcataggcttgttggcggaagttgattgtccagttaaacgatggtgaattgttgtacaccaatttggcatctggtacttgttttttgatgtcattgacaaatcttgcaatgcccgccacatctggggttggggtctcaatccaaatcatgtccgcaccgttttgtagcgatgtgatacaatctagcaccacacgctcatgctgcgtgccttcacggaattgatatagacccgatggcagacgagttgggcggtgtagcttgccgttacgcttgataagaatttcatcttctttggcttcactgatgtcaatctcggtggtctgtaaatagctgatgtatttactcgccaaatcgcccgcttcacggctgactgggattttttgggtcaaatcagcaccctctgagtcggtacgggccacaatcacgccctcatccacgccaagctctaagaacgcataacgcacggcgttaatttttgccaaaaagtcttcgtgtggtacagtcactttacccgcttgatgcccacattgcttagcatctgacacctgattttcaatttgaatggcacaagcacccgcttcaatcatttgtttggttaataaataggttgcttcttcgttaccaaaacctgcatcaatgtcagcgatgattggcacaacatgggtttcaaagttgtcaattttcgcttcaatttctttgacctttgcctcatcgcctgcttgctctgcttgttgcaaggcacggaataaatcatttagctctttggcatctgcttgacgaagaaaagtataaatctcttcaatgagttttggtacggcggttttttcgtgcatggattggtcaggcaatggaccaaattcagaacgcaatgcagcaaccatccaacctgatagatagatgtagcgtttgctggtagtgccaaagtattttttgttggcaatcatcttttgctgggcgataaatccatgccaacagccaagggattgggtgtattttgagttatcagcatcatactctgccatatcacgacgcatgatgcttgcggtgtatttggcgatatcaagacctgttttaaaacggttttggacaaccatacgagcggcatcttctgggcggatggcgttccaatgattacctaatttggctttaacagagcgaacatgttctagggctgattggtaggtcattactaactccttttaatttgacaactcaataaatgtcttatgacaagatcgcaccttatgtgcctagtcgctgatgaatgggtgattttagggttaactaaagttacctgtcatctagctgttatatacagcatacccaaaataatgcgattaatccaatagccttgaccaatgttcaccatttttaaaataaatggatataaaattatcattaaattttcaaataaataaaattatatggttgctatgtcttgatttatatcagattttttaagttatctatcacattttataaattatcatcataagatattattgataatccacccaataaagcttgctaaatttgtctttcttggctatttttatgctaaaattgtacacttgtactgccaatagatgatgatttcatgccaatggatgagatattagaccacctgcctccaaaacttgccgattttgtatttactcaagggtcgttaacggcacgattagaagcacactcaaaaaaacccctaaaggttgaaatcatccatcaaggctatcagccactcacctttgcccaaaaatcacaactgggactgcccctaaatcgcccacaaatggcttgggtacgcagtgtcaagttatacggtgatgcggacgcttgggtgcttgccaaaagtatttttcctttgtcatcactgacaggttcattagcacgcctaaaagtactgggtgcaacgcccatcggatatgttttgttcaaaaaaaggcaacaactgccaattaagcgtcatttttatcggtatgatggtcaaattggtcggcaaacagtttatgatatcaatgggcgtaaaatcttgattgatgagctatttttggcagcttttcaagcatcttttgaccaatgacagcacagataccgtcaagataaaattcagttattttgtgtaatcaatgaaaaataggcaccgccctagtgaatattgggcaagtatgctaaactaatcttgactttttattctcccaccaaacaaggaaaattcatgtttaaagaaatttcgctacatcaatacgacccagaattggcaacacaaattgatgccgaaaccaaacgccaagaagatcatattgagcttatcgcatcagaaaattactgctcacctgctgtcatgcaagcccaaggctcaaccttaaccaataaatacgccgaaggttatccaaaaaaacgctactatggtggttgtgagcatgttgatgccatcgagcaaattgccattgaccgtgccaaagaactgtttggtgctgattatgtcaatgtacaaccacattcaggttcaagtgccaacagtgcggtatttctggcattacttgagccaaatgacactgtacttggtatgagcttagcacatggtggtcacctaacccatggggcatctgtcaatttttcaggacgcaattatcatgcggttcaatatggattggacaccgaaactggcttgattgattatgaagaagtcgcccgcctagcccgtgagcataagcccaaaatgatcattgcaggtttttcagcatacagccaaatcattgactggcaaaagttccgtgacattgccgatgaggtaggcgcatatttgatggcggatatggcacatgttgcaggtcttgtggcaactggcatttacccaagccctgtacaaattgccgatgtcaccaccacaaccactcataagacactgcgtggtccacgctctggtttaattttagccaaagccaatgaagagattgagaaaaaattggcatctgctgtttttccaggtagtcaaggcggtccgctgatgcatgctatcgccgctaaagctgtttgctttaaagaggcaatgagtgatgattttcagagctatcaaaagcaagtcattatcaatgccaaagcgatggcagaggttatccaaagtcgtggctatgaaattgtctctggtggcaccaaaaaccatctgatgcttatcagcttaatcaaacaaggcatcactggtaaagaggcggacaaatggcttggcgatgctcacattactgtgaacaaaaattctgtgccaaatgacccaaaatcaccatttgtaacaagtggtatccgcattggtacgcctgccgttaccacgcgtggctttggtgaagctgaggttcgtgaattggctggctggatttgtgatgttttagacgcacgaggtgatgaagcagtcttagcagcaacgcgtgaaaagattgcccaaatttgtaacaaattgcctgtttatgagcgtaatgtggcataatattcgctgatcatatttctaaagtcgctcaatcttgagcggcttttttcaacatacaattctcataaagtttgtatcatttcatcatgaatcatatcgataattcaaacacactaagcaatctgcataaactggctgatgcctgcttgtatgattttcgcccaccagcagacaagctgcgtacacatggttttttgggtgcagggggcgatttgacggtatcaacactattacacgcttatcgttctggtgcctttccttggtttgatgaagacgagccaatctgctggtggtcgccagagatacgctgcgtcattacaccaaatgacttttatcccagtaaatcactgatacgcacagccaaaaagcagccttggaccatcaccactaatgctgattttgaggcagtgataaatgcgtgtcgtgcgcctcgccgtgatacctttcagacttggattcatgataatatggttttggcgtatcgacagctatttaaaattggtgcggcggcaagtatagaagtttgggcaggcatgccatatgacagcgagctgatcggaggtttatacggcgtgagttttggttcgatattttgtggagaaagtatgtttcacaggcgtaacgatgcctcaaaaattgccttttgggcattgatgcactgggcaaatcaatacggcatacagctcatagattgccaacttgaaaatccgcatttaagacgccttggggcaaatttgatgccaagagatgagtttttggagttactaaaacaccttgtcatgacgccgtgcttgggaatttctggcaatttaatgcaaatatcttgcattgatttggtgaattcatctaaataatttagatttattcaaataactatttaacatattcagctaagacaacccccataagctcataaaaaaatcccacatcggtaataagcgatataggattttcagagtttggcggtgacggagggattcgaaccctcgatacgctattaacatatacacactttccaggcgtgcgctttcgaccactcagccacgtcaccaaggttgactattatactcaataattgggcatttgtcattgattttttacgattgaagcagcccaatatccgccacactcaaaaaaagcttacgcacttggctaagcagtgccaaacgattctgttttaaagtttcatcatcagcattcaccatgacatgatcaaaaaactgcgtcaaaggctccgataagctcacaagggtcgtcaaaatgccttggtaatcgccatgattatgcaagggctgaacgctgactttggcagattcgatcgcctgatacagtgcctgctcagcaggttcaatcagattttggggcgttacatcaccttgcacagtaccagcttttgccaaaatatttgccacacgcttattattttcggccaaaatagccgcttgtggcaacaatcgaaatgctgttaccgcttggatacgctcatcaaaatccatcggcacatctgtctgcaccgcctgcaccgcctgaatcgtatccaccaagacgccctgctcactgtacatcgcccgatagcgcgcattgataaattccatgacttctgttagggtctgatcgatattttcaagtatatcgccatagcccattaaggcttgtttaaccagatgagataggctcacacgcaggcgtttttcaattaaaatacgcaaaatcccaatagacgcacggcgtaagctaaatgggtctttagagccactgggtatttcaccaatcccaaaaatgcccaccagcgtatccaaacgatctgccaatgcaagtgcaacacccacatgagtggcaggcagcttatcaccactaaattttggtaaatattgttcttcgatggcatctgccaccacatcaggctcatgatttaggcgtgcatagtaagtacccgcaatgccttgcaattcggggaattcacccaccaatctactcgccaaatcgcatttggataacaatccagctcgatacgctgcatcggtattagcacctatctgatctgcaatatgggcggccaaatttgcaatacgctcagatttttcccacaatgtaccaagcttatcttgaaaaatctgagtttttagatgatggttcagctcaaacagtggctgtttttgatcttgtaagaaaaaaaactctgcatctgacagacgaggacgaacaactttttcattacccgtaataatctgagcagaatctttagagttgatattactgataaaaataaaatgcggcatcagcttgcctgcttgatcggtcaagcaaaaatacttttgatcagcctgcatggtgctgataagggcttcttgaggaacggctaaaaatcgctcaggaaagcttgctcttaacgcaacgggcaaatccaccaaagctgtgacctcatcaagcaattcttgaggcatgattgccgtgccattcacatcatcagccaatgttttgacttgtgctaaaatatcggcttgacgctgatcaaaatcagcaatgacatgatggtttttaagtaaattttcataatgatcggcatgatcaatggcaaaaaaatcaggtgaatgatagcgatgaccacggctttggttgccagttttatggccttgaatggtcgcctcaattacaacatcatctgacatcaaaaccacccaatgaacaggccgtatgaactcatggcgatcaatgccagaacgcatacgcttagcaattggcaaatcatcaagcgctttttgtaagatatttggcattaaatcggtgattttttcgcctttaatggtcaaatcataagcgatgtactcgccttttttatcagcaatacgccccaaatctttgacgctaagatttcgcccagtggcatttaaaccttgcaaaaatccttgccctgcacgcgttaaattacctgcgtcatcaaacgctgccttaacacttggaccttttttagtttcgatacggtcaggctgaaactcgcccacacctgtaatagtaagtgccaaacggcgtggtgcggcaaaggcatgaatatcatcaaagctgatattttgatcatttagtaaagtgccaacgctatttttaagggcatcacgcagtgtttttaggttttttggtggcaactcttcggtgccaagttcaaataaaatcgtggtcataaatcagcctttttttgccccataaggcggcaaagtttacaataatcaattgccaaattagtcaaaaatttacactcattttaacacattttatgagctaaaaaatcaagccacccaaaaaatctggacggctttatctatcaattcatttgccttattcaggtatacagcttggattgactgtatttacaatattcactgtatcataagacaagttttggttcttttggcaaccacttctccaacgcttctgccttatgggcatcatctgccaaaggaaagcccaattttgcccgagcttcggtatagctgattgccactttgcgggccagtgtgcgtacacgcaagataaagcgttggcgttcggtaacgctaatcgccccacgagcgtccaataggttaaaggcatgactggcttttaacaccatctcataagcaggcaagggtaaattgaccgcaaccaacttatctgcttgctcttcataaaaatcaaataattcaaacaatttagccacatcggcatgttcaaaattataggcggattgctccacttcattttgatggaacacatcaccataagtcacacgcccaaattcaccatctgcccacaccaaatcatacacactgtccacgccttggatatacatggcaaggcgctcaagcccataggtaatttcacctgtaacagggaagcactcaatgccaccaacctgctgaaaataggtaaactgggtaacttccatgccatttagccatacttcccagccaagcccccacgccccaagcgttggactctcccaattgtcttcaacaaagcggacatcatgggtcagcgtatcaatgccaatggcttttaaagagcctaaatacagctcttgaatgttggcaggattgggctttaacaccacttgaaattggtaatagtgttgtaagcgattgggattatcaccataacgcccatcggttggacggcgagatggctgaacataagctgcattccaacgctcgggggttaaggcacgcaaaaaagtggcggtgtgaaatgtcccagcccccacttccatatcataaggctgcagcaccacacagccacgagatgcccaataattttgcagtgttaaaatcagtgcttgaaaagtcaaggtctcacccgaatccatataaatcctaaaactgtcacaaatgaaacctattctactaaatactgggtattttttctatcagtttttgagtttttgtcgttatcaagtttatcgttatcaaagttgggtaaataagggtaaaatcattgattttagccatttgcatggctttcaatcataacaatcaattcaaccttaaatcaaaattacagcgacttacggtcatattgaaccaaattcgtagcataagaatttggtgttgcatttggcataattagccaaagcaccaaataaatcaaaattcctggtacagcggccgataaacttgagataatcacaaatgcaatacgcaccatgttaggcgaccaccctaaatattcagcaataccacccatcacgcctgcaatcatacgatggttttttgagcggtgtaattttatcagtcttggcataaatttccccatagtttatcattgtgagtaaagggctaaaaaagccatttggtattagccactcttatttcatttttcattaaactttaatttaatcagttaaaatttaatcagttaaataaatctaatgataaataaataatggttattttaccgacaatttcaagccattcatagaatttggttaccaagtagcataaaaagtttacacagcatgacacaatctagaaaagacattgatatgataagtgtatcaattgatatttgggcaaggcagcttttgatgcggtctgattttgcccaatgatgatgacaaaataacataccaaggatatgataatgcaaccagaccacttgattttaattggggattttgcaccgctcacgcttagcatgcttgccgatattaatcatgctgcaggattatcaaagacattacacatcatcattcaaacgcccaaccatgtacctctgccccgtggtcgcacgccaacgctttttgatgcggtgcgttgggttcagatggcttgtcaatcatttggttttattaaaattcatacctttggtagtttggctttacctgatatgtcatttgattatcgaaacaatacgcagttgaccaaacatcaatttttagccatttgccaagcactcaatattaccgctcatacgaccatgcttggtattaaatcatcacataaagatactttacatccatttgaattgacattacccaaatacggccatgcctcaaattatgatgatgaattggtgcaaaacaatccattggcttattttcatcaactgtctgccgtctgccgatatttttatacccaaacggtttgtattgttggcggtgaaagctcagggaaaactaccttggtgcaaaaacttgccaattattatggtgccagcatcgcacctgaaatgggtcgattatacacacactcccatctcggcggtagcgaacttgcccttcaatacagcgactacgcatccattgccatcaatcacgccaacgctatcgaaaccgctcgtaccactgccagctctgctgttacactgattgatactgattttgcgacaacgcaagcattttgtgaaatttatgaagggcgaacgcatccgcttgtcgcagaatttgctaaacaaatgcgattggattttacgatttatttagataataatgttgcttgggtcgctgatggcatgcgtaggcttggtgatgatcatcaacgcagtttgttcgccaataaattgcttgagattttggcacgatatgatattagttatcatatcattaatgacaccgactaccacaaacgctatctacaagcattaagcttgatagacaatcatatttttaatcattttacaaaaattcatgacaattaattagggaaaatctgatgaaaattgatattttagataacatcacaggctttggtaaaaaagattggacaacaagctgggtgctactttggtttgtttgcggatttattgcactatttactggattttggaccacaacagctcacacgcatttggattggttttattttgtcatctcaatcatcggcttggtctgtgtggtaagtttgtcttttcgcaaaaatatcacaggcaatggacttggtatggttgccacagcaggtgagatcatcgtacaaggtacatcaggtgccgttggtctcatgcttgcaccgttatttaatttttttacacatgtctatggtgttaaatactggtcaaaccatactggtgctgatggcgatatgattccaaaatctgcaggaaagtatgtttggctcatcaccatatgtttcattgttttggggctgttattattcccagcggtcaatacatggcttgcgaatatgggctatgtggtggttgaaaatgacggcagtcgatttttggggcgaattgactttttttggattaatgtcttagcatttgtcttgtcaattaccgcacaaacgatgatgattttacgctattccttaaattggtggctatggattgtggttaatgcggtttggctgattattaatcttatgacaggtaataccatttttgccattcaaaccgtgatttatcaaatcaatgccattgtcggattatatggctggtatcgctctgagcagttagctcgcttgcaatcgccttaacatttggctatagtaagcaaaggaccagccaaaggcgttgtgatgccactatttttaagccaaaaactgctcaaaacttggctcaatgactatgccacaagccatcaaaatcccaccaataaacacattcattagctgtgtgtgccaattatttttgcattattgcactgattgatctgatacatccttaatttaatttatttgctaaagccgtttttaagacggcttttttatggctgcttaagatatggccaagcagcttttagataaatcatcatcgaccaaagcgtcaaaatgaccgcaatgaccatcagcacatagccgatcatctcaagcgattgccaattaagcaaaaataccgtaatggcaatcatctgaaaagtggtctttaatttccccacataagacaccgccacgctcgtgcgtgcaccaagctccgccatccattcccgcaatgccgataccgcaatctcgcgtgaaataatcacaatggcactcgttgccatcacaatatttggatgccactgcacaaggacaattaacgcagctgccaccatcagtttatctgccacaggatccaaaaatcgcccaaacgctgatgtgatattcatacgccgagccaaataaccatccagccagtctgtgactgccgccaaaataaacagcaatgtcaagatcagatgtcgcagcatactgtcgctatagcccatcatgcccaagcgtgcgatggcattatcaggaatcgcaggcacgccaatgccaagtgcaggcggccaataggcaatcgcaacaaatagaggaatcatcacaatgcgtgcgatggttagattattaggtaaattaaataccgagggggttttaattgaccgagattgtggatttaaactcatgcagcttggtttttgataaatttgtattatgataccgaatttttgggtgatttgctatggttttgctgaatttagctgatttcaactcgtgattttaaaacccaaaaatgctaccataagccatctttttattttattgatccggcggtgagtttttgtgagcatcagtgtagacactcttattatcggcgcaggggcatcggggctgttttgtgcttttaatacggcggcatatggcaaatcggtactcattattgatcacgccaataaagcgggcaaaaaaattcttatgtcaggtggcggtcgttgtaatttcgttaataaacaagttgaaccatgccattttatcagtcaaaatccgcattttgtcaaatctgccctatcaaaatatcagccagaagattttattgatttggtcaaccgccatcacattgcccatcaagagcgtgaacatggtcagctattttgtaaaaacagtgccaaagacattttatcaatgctactaaacgaatgccacatggcaggggttgatattcatctaaaaacaaccgtccaagatattcaagtaactgatactcattttttggtcactgtcaaatctcaacctgataatcgcatcaaagtcattcaagcacacgctttagtcatagcaacaggcgggctatcaattccaacactgggtgcaagtggttttggctatcaagttgccacgcagtttggacatcaaattattccaactcgtgcaggactagtcccttttactttcaccgataaagtcggtgagatgataaaatcattagcagggttaagtcttgatgtgattgcttataatgacaaagcatcgtttgatttaccgatattatttacacatcgtggtttatcaggccctgccatattacaattatcaaatcactggcaagcaggcgagcaaattaccatcaacctagtccccacccaagatgtgtatcagtatctattagatgcaaagcgaatacaccccaagcaattactgcgaactgccctagcagccttattgcccaaaaaactcatcagtggatttgaaccattgttctggcaagcttatcaaaatattgaacttgccaatttaaaagatgaaaccatgcatcacattggtcagcagttaaatgcttggcaccttaaacccagtggcaccgaaggctatcgtgtcgcagaggtgactttgggcggtgttgatacgcatgatatctcaggaaaaaccatggaatcacgccgacagccaaatctgtattttatcggcgaggtgcttgatgtggcaggacagcttggcggctacaactttacttgggcgtgggcaagtggttatgcctgtgctcagagcattggggtgcggtggtagcggtaagatactattttaaaccaaatttaaaccaaaaccttaaataagcagacaaccccacacccaatctttagggcgtgggatctaaaaacgaccaaatacttttggcagtttagcttaattttttaatcttaaagcccatatcgatgagtgccaattcttgttcaatgggggcaagtaccgcttgatgacttggcttatttttaagatatttttgagccacatactttaaatcatcaatactgactgccaaaattttggcacgcagattttgttgccatgccttatcacgatgatgtagctcattaaaacatgacttgaccgcctcaccagcaggtgagcctggtttatccatacctgcaataatccctaaaattgcctcgtgcaattgctcagtatcatgctttgtctgcaaaagccaatcgatacttttgtcaaaatgtgcaaaagtcttggcacaatgcggatcacggtagctataaaaccgaaatgcagcagcattgctatcaaaactggcaccgctgccataagcaccgcctttttcacgaatagcaccatgcaaataaccatttcttaaaaatggggcaagtaccattaaagcaggcgtatcctcatgctctgatgttgttgcttgataggcagctgcattataatagacattgcttgagattagccatgcggtttttggttcatcctgttggcataacaactcatcgagtgtatcaaaaaccagcttgtgagatactttttgacttggtgcaggtgtttttttggtgctgatatattttgagatttcatctaataaatctggacttacctgctcttcacaaacaagcaatacctgttttggcaagcttattaaagtttggtgcaactcactgagtcgatggcataaggtatcccataggctgtcatcggcttgtgctgatgccaaaaatgatttgagtgctaccaacgcaggcaatcctgaataagcatactcaatgcgtgcttggcggctcatccgagaagaagcggtttgcatggcgtaagcatgccctgcacttgccaaacgagcctgccagctactttgtttttgttgtaacagttctcggatacggtctgtttcgctaaatacagtctcattcatcacctcactgaccagctcaatggcttcaagtttacgattcaaggcacgggtggcaaccacaaaataactgctcaaagactctttgtcggttaattgtgtccgctgactgatacgagcggttacgccagatgaatgcgatgcttgcaccgcctgaaaagtacgggcatcgtagttgtttgttcccacttccgataacaatgtcaaatacagcggcagcagcgggttattaatcacctcatctgccaccttatcggtcagcggtgtgatgacttgataataatataatccattggtgcctgtatgatacaaatgcactggataagtttcaccgtccaagcttaaggttgttttgatgcccttggtaaatgccacctcacttggaatatcctcaagtccaacttttggcaaaatactcacatcatcaggggctgcttgccgagcttttaattgagcggcttgtgtgagcagattttgtttatcatcatcactaagcgtggcatcaagtgccgccagtgcttgattttcctcatcaaccaatcgagccgcttttttggtatcagcagacaaggttaagcgtacacggtgcggattgtcaatcaaatattggcgaatcaaattttgtagccaatttggttcacctgcctgttgttttagccatgccaaatgctcatcaatctgccaaacatccaagggattaccgccatgaactgcggtgctaaatgcctctagcatcaaggtcagtccatacggcatactgtcaccaccaatatgacgctgatcaatttcaatttgatgcaaaatggtttcaatgacttcttgggaaattgggttgtctgcaatttggtttaatagtgccaaaatccccttttctaacacttcggcgtgttcaggctctgagccacgcacccctgcataaaataccatttggtaatggctatcatccagcccaagcaagggactgggtgcaactgccagcggatgactttctaaatatgcacgcaaaggcgaaccactgtgttcagctaacacaccctccatcagtcgcagtgataggcgtaggcgtgggtcggtaatggttggcaaaagccatgccaaaacatgatgggtcatctgtttatcatcactatctgcactgtatgtatcatacacctgaatcggctggcttaacggtttttcaatgacgccagtgaactttttgccttgtgcaggtttttgaatatcatcaaaatgcgacaaagcctcgtcatgaattttagcttgaatttcatcaacggcaatattaccaaaactcatgataatggcattgcttggatgataatgcgtctggtgaaatgccaccaaatcctcatgcgtcatctttggaatctgagcagggtcgccaccagaattataatgataagtggtcgttgggaataaatgtggcatcaaggcataatacagctgatcaatctcgccgctcatcgcccctttcatttcattgaagacgatgccatgatactcaggctggttatcttgattaatctcaactcgaacgccttcttgggcaaaatcaagtggatgaatattggggaaaaataccgcatctaaataaacagacaataaattaaaaaaatcttttttattttgactagcaaatgggtaaactgtccagtcgcttgctgtcatggcattcataaaagtgttcaaagaacgcttaatcatactaaaaaatgggtcacgcacaggatatttttgagaaccgcacagcacaacatgttctaaaatatgtgcctcaccacgagaagtcatcggctgagttgcaaagccaatcattaatgcattttcactgttatcgcacgccaaatgataatgagtcgcgccagttaaacgatggcgtgatgtcaaaactgtgatgtcaagtgcttcaatgctacgcttgtcaattaactcaaaacttgaatgaagtgtcgtcataaaactgtccaaaattttaaccaattttcattttaacacacttttaaagacatcatcatttcatcagattaatttttaatgcgatgagaaaatcagattggcttatggcgtttgatgatccatgttattttagataccagattaatcaaaattcttaaccaaaattaaactcatcaatcaatttggctttttatcaaatccaagatgatttatgacaaggcttttgatatactaaaattaatcaaacaacttggcaaactcaggagaaagtgatgtatcagcatgtattactcgtaaccgacctaaaagatgataccgatttggtcgctcaaaaggccaaatggattttggatctgcagccacaagcacagctctcggtgctacatattgtcgaagaaaccatgcttggttttggttatgagctgattcctgcatcagccttgcacgaacacattgatgatgaacgctgccaaacggctcgcatacgcttggccgatgtgctagcacgcaatcatttacaagcacatcatattaatatcaaaaccgccatttcagggcgtaaaggtattgttgactattgccaagctcatgcagtggacttggtcgtaattggtcgtcataagcgaactggcttatcagcttggattgctggagcgaccgcagatagtattttgccagatattgacagcgatttattggttgtacaattaaccgaagattaataaccaaagattaaccagccaaatctaaaacataaccgatatccatcatccatatcggttaaattaaaatcatttcatcgttaaatttcatcgttaaattaatcatcaaagagactgttttatgtatgatgtcgttgctattggtaatgccttggttgacaccgaattcaccctatccgatgccgctttagatgccacaggtttggctcgtggcaatatgaccttagtagataccaatggtcaaaatatgctgtttgccgccctaaatgaacaaaacctaaaacctgccaaacaagcaggtggcggctcagcagccaatagcatggtggcgtttgccgcactgggcggtcgtgcttattatcattgccgtgttggtggtgatgatatgggtgatttttatttgggtgatttagccaatttgggcgttgcaaccgatgccacctacgctgtgcaagcagatgggacaacaggctcttgtgtggtattggtcacaccagatgcagaacgcaccatgcaaacgcatttgggtacaagcagtgaaattaatactgacaatattaattttcagacactcaaagacgcaaaatggctgtatttagaagggtatcttgccatgtcaccttcagccactgatgcactaagccagctgtacgagcatgcacgcaaaactggtgctaaagttgcggtgagctttgctgatcctgctgtggtaaaatttgccaaagaagggttaagtgccatcttaaaccgtggtgtagatgcgatattttgtaatgctgaggaagcggcattgtttgccgatgcagatgccgatcctgtcaatacactattaaaatacagtgacttggtggtcattaccaattcagataaaccaaccaccattgcctgtcgcatcgatgatcgcattatcgagcatcacattgatagctgtgttgtcagtcaagtcatcgataccaatggtgcaggtgataattacgcaggtgcgatgttatatggtttatcgcaaaatcttgatttgccaaattgtggacgcttggcggcagctgtggcggcagctgtggtgggtcagtttggaccacgattaagcatcgcagagtatcaaaccatcaaaaaacgcaccgtatcattgacataaatcaatcttcttaaaaacccctttttaaatgccataagctaaaaaaaggggttttattatcatgataaactaattaacaacaagctatttgattggctctatcaagcaatcgccaaaaaattatttgtaataagcatgatctgagatactgtggtcggtatcgtctaccacttgggtaagttctgggatttgttgttttaactgtacttccaccccttggcgtaaagtcacatcaaccgccgaacacccttggcaaccgccgccaaatttcaaaacggctgttaatcctgcttcatcttcaatcacctccaacaaatctaccgaaccgccatggctggcaagattggggttaatctctgattgcagcacataattaatacgctcttcaatgctggcattttcgcccacttgcggaactttggaattgggcgcacgaaaagtcaactgaccaccgaatcggtctttattataatcaatcaccgcatcatgcaaataaggaatgctatcagcatcaatatgagcggtaaacttggcataatcaatgtgcaaatcttggtcatcgatttcatcagcatggcaatagctcatgcaacattcagcacggggcgtgcctgcatgttccacaaaaatacgcacaccaatcccctcttcttcttgcttggcaagcaaatcagctaaatactcttgggcgggttcggtaattttgatattactggttaatgcttcactcatggcaactctcttttgtttaattaatttaatttattgtgttttatgaaactttttggctttttagcaaatcgtttggctgtggttatggtgcgtatttgtcagatgagaatgcaaacagcctgcaagcttaaacgaccaatatcttttttggcttgtatgctaacatcaatttatatggtaacataacttaactttatcaacccaaattttttaaattcttgacaattcttggataaaaccatgcattcatcgcaacagtttgactatttgatttttatcggacgctttgagccttttcaccaaggtcatcattatgtcatcacgcaggcattagcacacgcacgacaagtaattgttttgatgggttcggcaaattcccctcgcacgattaaaaatccatttcgtcccgatgagcgacaagcaatgattttaaacagttttgacaaaaaaaatcgtgaacgcattcactgccttggtatcaatgacgccacttataatgataataaatggctcattgaagttcaaaatgccattgtcagcatcacagccaatacacccaatgaacgcattggtattattgggcatgacaaggatgaaagttcgtattatctggcactttttcctcaatataagacatttatggtcaaaaattttgaatacatatcagcaacaccaatcagagaagcatattttggtgatgatagtgccaaaaaacaggcaagctttagccaactgactaaagcttgtgttgaatttttaacagcttttgagcataccaaagcttaccatcgcctcaagcaagagtatcagcacattcaagcctatcaagcagcttggcagacagcaccttatccacccaacttcatcaccagcgatgcactgattgtgcaatcggggcatattttgcttattgagcgtggcggtgaatatgggcaaggactgtacgctttacccggcggttttgtggataccaatgaagatttttatcaagcatgtttgcgtgaagttcacgaagaaacaaatctagatatcagcttgctcaaaaacagtctgataacagcaactttgtttgatgcacccaaacgcagccaaagagctcgtacggtgacgatggtgtattattttgagctaccaaagcagcaaaccctacctgatgtccaagctggtgatgacgcaaatcgtgccttttggctacctttatccgaattaaatgcggtacagatgtttgaagaccattatggcatcatctgtcagttacttaaaatttgactgcgatactatacaaagtttaagatgtggttttttccacatcttaaactcatgccaaaacatcaataaactgtactcagccatacaccgccatgagcgatgcttacccaaactttgcaaacaactcatttaacgcttcgctcatcgttgggtgagtgaaaatataatccctaacctcttgataagtcagaccctgacgaattgccaaatccataaagttaatcaactcatgggcattgtcacataacaactgcacacccagtattttatcggttttggcatcaatcaccgcttttaatagtccatcggtttgctctaagattttggctttgggaatgttgaccgcctctaaaacagccgtcttaacggcatgcccttgctccttggcaacttgctcggtcatgccaacattggcaagcggtggattggtaaacaccgcataggcaaaagtgcgtccttttgtggtatatgtgccatcacccaacacttgacttttgaccacccgataatcgtccaaggaaatataagtaaactgtggactgcctgccacatcacccatcgcatagatatgtggcacgctggtttgtagcctatcattaacggcaatgttgcctttatccgtcaatatgacgcctgctttatcaaggtctaacccttgcgtatttgcccgacgacctgttgccaccaaaatcgcatctgccatcaattccccatcttcggttacaaccatcgcatgattgttggcatcattaacctgcttaatttgttgcttggttttgacagtgatttgtttgtttgccataatgcccaacaaattttggcgaatgtcagcatcttcttttggtaaaaaagtatcggcagtttctaaaatcgtgaccacactgccaaacccagcaaagataaaggcaaattccaacccaatatatcccccaccaatgatgaccaactgttttggcaattgggttaactgcatgatactggtgctgtcatgggcaaatttgctgtattttagcccatcaatgggtggttgccaattatacgctcctgtattgatatgaatgtggtcagcggtgatttttagagtgtcatcagctgtcaccacctgcacggtcttatcatcaataaaactggcttcacctgtgatgaccgtggcgttatctaattcattgactttatcaaaattggcttgattgagcttagcaatcagttgatttttacgggcaatggcatcgcttaatgacacatcacgctcatgtgataaaaatgccaatttttttgatggaatacacccaatattaatgcaagtacccccatacatatcggcagatttttctaccaagacgacctctttacctgctttagcaagggtttgagccaaagttttccctgctttaccaaaaccgatgatgagatgctcagtgtggcggatattgtgagaatgtgtcataacttacccttaaatatttacccttaaataaattgcccttaaaaaataaaaataaaccaaaatggctgttaaaccaaacaacttaaaaaaacctaaaaaaccgaacttaagctaaaaccaaacctaagccaaggctttagattttacccaaattgagcattgttatccagccaaatcataaccaaatcaccttttatcaaccaatcattaaggtgttccaaacactgttacataaacaacacaagccaataacgcatcatgcctattttaaaaatgattggttgttataatcaaagggtaagtgaattttttactgttttaccgtttttaagtggctttttttaaataacggcttagtttagcaatgttgcctgcttaaaaatgctgcccacttaaatcaatcatttgacttagatttggttaaattttaaatttaagttaagaatttcaataaaaattgacttatttgtttatcacacatgaatataaggataacatgatgaccacacaaaacaatcaacaaaacggcaaagttgccatcgtaacagggtctgccgcaggtttgggcaatgccattgctactcgtttggcaaaagatggctttaaagtggtgttgcatgacatcagcgaagacaatttaaaaacggccaaagatgaatttgacaaagcaggctatgagagcatcagcgttgttggtgatgcctctaaaaaagacgaccaaatccgcttggtcgatgaagcggttaaggcatttggacaggtagatgtgtttgtcaataacgcaggggttgagtcggttgagccatttttggcaattgaagaaaaagagattgaccgtgtgcttggagtaaacatcaaaggcgtgatttttggcacccaagcggcggctgagcagatgaaaaaacaagacggcatcggcaaaatcatcaatgcgtgcagcattgcaggacatgaatcttatgagatgctaagcttatacagtgccaccaagcatgcggtgcgttcgttcacccattctaccgccaaagaacttgccgagcataatatccgtgtcaatgcttattgcccaggggttgctgacacgccgatgtgggagcgtattgatgctgcttttgttgagcataaaggctatgaaccaaaacaagcatggaaagagtttacccaaggcatcttggttggtcgtccacaacagccagaagatgttgccaacttggtgtcatttttagcgtccaaagatgccgattacatcacaggtcaaaccatactgaccgatggtggcatggtatttagataatggtgtttagataattgacaatgtgatgactgacataataacattggcgacattgaaagcaacattaaaaaaagcattgggagagttgcccaatgctttttgtggataataagaaagtcattaaaaacattttaattaaacccagagagatgatttatgacagtacactcagtgaaacactcagttaaaaaaaccaagcggttttttttgcccatggtgatgtcgttgactgccatgatggcattgaccgcttatggcaaccacctgacatcacaacccagctctgctaaaaccatacccacccaaaccatggagcatcacgccatgaacataacatacaccaccaaaaccatcgccagccgttatgattttaatgacaccgtcagtcgcttgcagtctgcttttaaagagaaaaacatgaccatctttgccaccattgaccaccagcacgctgcccaacaagtggatttggacatgcaacctgccacagtcatcgtttttggcacaccaaaagcaggcacgccattgatgaaaaaagaccctcattttgcgttaaaattacccctgaaagtgttggttaccgaaatagatggtcaggtttgggtcagctttgaagacacgcacgcactgatagcaggcagtcagattggctttgatgatgttaaagacacgcttgccaatgctgaaaaattaattgaaaaaaccgtaactcaatagtgatgttttaataacttttagttttaataacttcagaatcaatccattacatcaggatacgatgatgaaacacgccgttttattggcattatccgtggcaacttttggcttaagtgcctgctcattcaatgccaccgcccaaaatccaaccacaacaactgccatcagccagccccctgccaaagccgtgggtgtgtggattgatgttcgtagtgccgaagagtatgccgatgggcatttacaaggggcattaaacatcacgcctgaccaaatcgcaagccatattgaagccattgagccgaataaaaacgcccccatcaatttgtactgtcgttctggtcgccgtgctgaggtggctcgtaagacactcttagaaatgggccataccaatgtggttaaccatggcggctatcaagacttgtatgataaaggttatcgttgatggttagtaaatgccaataagacagtaagagcaaccatcagcttaggctgataaaatgagtgtgccagttattttttggtgatagtgattttaaaatctaatgtattaaaaaacaactttaaaaaataacttcggcacgcccaaagatggatgtgtgatgactgcgagcgtcatgtttactgttgtaataactcacatcagtttgtaagaatagccatggtcgccatacaggttggcgatagcctacataaggtccataagtatttaggtatacttttttatcttggatattaccacccacatataaaccataattcagctctgatttgccatgcttgacaggcacaaaatgacgctgaaataaactgctgtgccaataaagattttcttctcctttgtgagtataatgcagctggctacgactgaccaaatcactatgcccagattgtggctgagtgaactcaagcgttgaaacagcagtatgttccgtatgtgagccataacgatacatttgctcaaaatgcatcgtaatatcatgcggcatctcccatttcttttcggctttggcacggatatagacatcatttgacctgacgcccaaatctatatcaatatctttattacgacgaaatttagaccatctgagtgccaaagaagagttactctctcgtgtttcacggcgatcgtatcggtgatcattagcatttggcataactttacgatcatcactcagcgcaccatcacgggtttcataatccaatgaatcatcaccaaaaaccaaactaaggcgattttcaagggttggcaatttaatacgacctcgcacacgaggtttaatttttataccatcatatttattccatgtggtgtccatcatcactcgtaagcttgccttagcaggttttgttgattgattttctccaaaccatccatctatattaacagcactattttgaagccaatcttgaaaaccttgatgatttttatcaatccagcccatggtattgatgtcaggttttatggcattcatgccagtttttacctttggttgtgccagctcatcaaccgccgcttttgctgtttgatttgcccataccagaggtgtacccgccattatcagcacacatacaacagctattttacactgcatgatgccctctcttaactccaccaatcaatcaagatgctaaatttggctgatccatagatttaccccaaaaccaataaataacatcgcagcactaaacatcgcaaggctactcaagacggggcgttttgaaaatttttcagccaacgccttaccagtatacaccaataaagtcaaatagctaacacttaccatctgtaaaatcaccgccaacaccaaaaagcttagcaatggtttatcataatttgggtcaacaaattgtacaaaaaacgacaaaaagaataaaatcgctttagggttggttacgctaagactgagtgaacgataaaaataattttgtttttttggtggcttaattgataactctgacttcatgatggcttggcgatttttaaaggtatggtaagctccgataatcaggcgagtgccaagataagccaaataagtaccaccaatcagcttgatgacatcaaaaacttgtggatattgcttcagtatggcacccacaccaaaaactgttgccataatcagtatgagatcgcccagtaaaacgcctgcaattgcccgcaaacctgctgtataaccatgtgatgctgataccgataagcaatacaaactgtttgggccaggtaaaacgatgaccacaaccaccgccaaaaaataagtcaataaattgattgtaccgaacattacacatccatattaacagcttatcaaaatttgctcactatagcgaatttattttttacttgcaatcatttcgtaaattttagttataaaaatgccccaaaaattatctaacttttggggtgattgcaattttttacaatttttgagtcaatgccaatacggctaaaggctatcgttgaccttgcgattcttgaatggcttgcatttgagcatcaatgattgcctgctgttcggcagctatggctttttcatcagaaactttttttaggtcaatcacaaagaccaaaacactgtttggaccaatgccagcattgtacataccgtgttcaccatatgccatttggcttggaacatacagctcatatttgccaccttctttcatcagttgcaagccttcagaccagccttcaatgacctgacttagcataaatggcacagcctcgccttcagatgaatcaaataccgtaccatcaatcaatctgccttcataagctgcataaacaccatctttggccgtgggagatttgcccgtaccctcagtaataactttatattgaagacctgatggtgttgtctttacgccatcttttttagcattttcagccaaaaacttttcgccatcagccttattggtaacggcagcttgttgttgtttttgaatggcttcttcggttttacgcttttcatatgcttgacccaatgtctgaatctgctttttcgttaaagcgctatcaacacctgcatagccatctttaaacgctttgatataaacatcgatgtctaaattttcttcaatttttttcatagactcgcctgcgtcatagccaaacacatagctgacttgttcaatctctgtgcttttatcgctaacgacggttgacttttcgcctgctttaggcagcgaagctgaagtgtctttttgacagcctaccaaaatcaatgttgctgccatggtggcaaccagtgcatgttttttcataaatggtctctgcatgatttctatgtaatataaaaagtgatgtaatataaaaagtgtgatataaataaagttggctaatcataccaaaaattaccatcgtttaccatgccttaagtaaggtttttgaagcagatttgataacaatcttgtatcgttcttgtgaatattcttacttatggcttcttataaaataagccaaaaatcatttaatctcttgggctaagcggtgtcatttcaaaaaaagattttttcccattttgcccaatttatccatctgtgcaaatttttgatgacagtgttgcttttgagtatttaggcagtcatcacagtaacaaaaaacctgcctaagactttagacaggtttttattagggctatgacaaagtaaatttaaatcacctatatagtcatcaagctctatccaccaatcttcttatatttcatccgcttaggcgtggcatctgccccaagtcgctctttacgccatttttcatattcgctataattaccatcaaaaaactctggcgcttcgttctcaaatgacaaaatatgcgtacaaatacggtctaagaaccaacggtcatgcgataccaccatgaccgtaccagggaacacctgcaccgcatcttctaaggcacgcaaggtctccacatcaaggtcgttggatggttcatccagcaagatgacatttgccccttgttttagggttttggcaagttgcaagcggttacgctcaccgcctgataaattaccaacgagtttttgttggtcttgccctttaaagttaaagcgtccgatataggcacggcttggcgtggtatactcacccacagtaatcatatcaagcccatctgagacctcctcccacacggtttttttatcatccagctcatctctgacctgccccacataagcaacttttacgctctcgccaacctctactgtgcctgtatttggcgtgtctttacctgtaatcatgttaaaaagtgtggttttgccagcaccatttgggcctacaataccgacaattgccatgggtggcacagtaaatgataagttttcgtacaacaagcgtccatcaaaagattttgagatgttattgacctcaatgactttattgcccaaacgaggccctggtgggatataaatctccgccgtttcgttacgctgttgaaactcacgagagttcatctcctcaaagcgttctaggcgagatttggatttggcttgctgacctttttggtttttacgcacccattctagctcttgttttagtgccttggcaaaggcctcttcttgtttttgctcttgttctaagcgtttgttcttttgttctagccactcggtgtagttgccttggtaggggtagccataaccacggtctagctccaaaatccactcagcgacattgtcaagaaaatagcggtcatgggtaatcgccacaatcgtaccagagtagtcttttaagaagcgttcaagccatgccacagactctgcatccaaatggttggtcggttcatccaaaagtagcatgtcaggcttggacagcagcaaacgacacaaagcaacacggcgtttttcaccccctgacagcttggagacatcggcatcccacggtggcaggcgaagggcatccgctgctttttcaagctgagtatttaggttgtgggcatcccacgcttgaatgatgtcttccattttgccttgctcggctgccaatttatcaaaatcagcatcaggctcggcatattcagcatagatttggtttaggcgttctagggcatctaaggcctcacgcacaccatcttccacattgccacgcacatctttggcagggtcaagctgtggttcttggggcagatagccaattttaatgcctgttgccgctcgtgcctcaccgctaaattctgtatccacacccgccatgatacgcagcagcgtggatttgccagcaccatttagacccagcacgccaattttggcacctgggaaaaaggacaagctgatgtcttttaaaatttcacgctttggcggaacaagttttgacactttgttcatggtgtagatatattgagccataataagccttaattagttaatttttgattggattgagttaaatgattattgataaaaatagttaagctaaaaagtaaaacaagttaatgctttattatcgcatgctttagaaagtggggcaaggttattcatttgataaatatctgaaaatgatgcctatagaaaagaggttaaattttaacattaaagatataatttaacttgactataatattatgttatagtactgtatagctcgtgttaaatattattcgcaatgtgtcagctatcccaaccgattaaacccacatttgataatattggcacagtaaaaagtgttaaacgcttacttgacagtgagcaagacaaacttacatcatcacatacttatcaaaattcggagtatatatgaagttaaaagctattgctacattgggtgcattggcattattattacaagcttgtgcaacgccacacgtggttcaaaccaaaaaaattacagacaacgagctgacctgcagtcaaatcaagagcgaaattgctgaagctgaggaatttgagaagaaagcgcgtgccgaacgcaaaataactggcaaaaatgttgcagcagcagtatttttctggccagccctacttggcacatactcaaatactgaagaagcaattactgccgccaaagaacgtcaagcattattgacagatttgtattcaaagaaaaactgtcaataatgccaaattagacatttgcggtaaaatactaaaataataatcagtattttaccgcaattttggagtagatctaatgccaaccatcacccacagccccgatactcagcgttttgaaacgaccattgatgggcatactgcgtatctcagctatgccattattgatgataatacgctaaattatcatcatacttttgttccgccacagttaggcggtcgtggtgttggtacggcattggtgaaatacgctgttcaatatgccaatcaaaataataaaaccatcataccaagttgtagttttgtggcacattacatcaataagcagcacacaacataaaaccgagcaatctaacataccgctgattttgcagcttcattaatcaacataatcggtctgatgacttagacattctcaagtgcctcactgtgattttaagtatcatcgattttaattattgttaattttagtgatcaaggattatcaagcgtgtatatgattggctaagctgcatttaagtgacatataagtaacataattttcattaagtgttgttaattgatggtataatgtcattttatcaatgactgattttatcatcataccaacccgtacattaactgattggtgtgtgttaagtgattgtctgatggtcttataaggctgattatgtggcatcgttcttatcaccttttaaacattaagttttatccaaacgccaagcctcatcaattgtctaagcgtcaccgatcgtggtttggctgggtattggcggttttagcttggttgatgctactgatgcccatgacatcttcactgtgggtggaaaaaccaaagattggttataatatttgtattaagcttgcccccattatcaatcatatcaatcagtcgcaccaaacccatactcaccttcaccaagcacacacgcatttttcaaaaaaagacaaccaaactccccatcaacatgactgcgatatttgtctaagtgccatgtcttttgcattgccagcgggtgctttgggtttgtctggtcatattttacaattcaacagacaattgggcgctttttatcgtcagttgcgtttgcagtttttatttttcttacgcccaccaagccgtgcttctcctgattattcttaatcaaatcactccaaaattcatcacaatttgtcaatcattacattgacaaaagcagatttattttggtctataaaaccaattcacacaattttactgagaatagttatgagcaaaagcatccaatccaatctttcatcaaaacacagtcaatcaacagcgccacagcattatttacgcatttggcggtggcatttttatgcagggttatttgtcataccatttttggtgattttggccggcacagggcttggcatgattatattatccaatacggttggcaaacaaggtgagcttatcagcgtatcgccacaaaacaccagtatggcagtatctcatcaagctcacatcgccacatcaaacatcgctggcggacaagtgacgcaatacatcgctccaaaagatgatcatcatgccgccgcttttttagttaaaaatcatgataccaaagttgccaactgggttgccatagacccctacacggcccaaatcgttggcacacaaccgcaaaaatctggcttatatcacacattagacagcattcatggtgatttattgatgggtaaaacaggagatttattgcttgaaacagcggcttctttaaccattttattaatcatcactggcatttatctttggtggcaaaaacgcaaaagtgtgataaaaatgctgaccgtacaagacaccaaaacaaaacgcaacttatggcgtgaaatacacgcagttttaggcagctggactgccattgtgttgttatttttttgtatcacaggcttggcttgggctgggatttggggagaaaaaatcatgcaagcatggaatcagtttcctgctggcaaatggggcgtagaacctgtacctacctccagtttacccgttgatactgcccatgatgacgcatcataccagcaacaaaatacagcagatacaccccatcatgccacagatatctcagcacccacacacggtgacgctcttaatgatggcacaaaacaagtgccctgggtacttgaaaaaacccccatgccaagctccacgcccacatcaaacgcatggcaaatgacgcaaccagacattgattttattgataacatggctaaaaacatgggctttgtgggacgatatcaaatcaactaccccaaaacaccaacaggcgtttggagcatcagccaagattcgatgagctatgacagccccaatccaaccgctgaccgcacagtacatattgaccgttattctggcgaggtattggcagacattcgctaccatgactattcagcatttggcaagtttatggcggttggtattgcactgcatatggggacagcaggaatttttagtattttggcaaacctcttattttgcttaagcgtcattgccatttgtatcagcggtcttgtgatgtggtggcaacgcagacccgccaccaacctgcataaaaacaacaaatccgctttaccgatgggcttaatccccccagccagtcaaaaaaacattcccatttggtggggttttggtggggtgttattgttaatttcagcactctttcccatggggttgtttgccatcttggttatcgtcattttagattggctcatcatcagccgagttccattattaagtaaactattaaaataaccaagcctgacaatatcgtttatcatataaaaagtggccttagcttaattggccactttttattattttttgtcattaataaccagcctgactgacattatcaatcatcagccaccatcacggtcatactcacagcagtcgctgctgccatcttagttgttgtatctggtttttgatctcatcaccgatactcatatgggcatgatttggctgattaacatggcataatttacacaggcacatcaaattattttggctattattctgttttacgccatcaatatgatgcacatcggccaaatgctgatacccagataagttaacgccacagacttgacaaagatagtctttgctttttttaaaattacgacttattgtcgaccaatcttctgtataaccacccttattttgtcccacatattcgggcaatttggtaaatttggtctgataatcaccattaaaaaatgccaaaaagtcaaaattttgcctaaaaattgctggtgttttgattgataaataatcattataattaagaatttttaaacaattatgacatggcatcagcttggttgtatgcgtatcgccaacattattaacaatttcaaataagccattttgatttttattaatgtgataacgattcaaccgaccattgttagccatatcatcaagtgtcttacattgggtaaaatgtacttttttacctacattcaaatcaccatttttaacttgatcaaaactattcccatagccatggtcaggaataaataacacgacttttctgccatgataggcaaacacacctgtttcatcagtcgccagctcagataaactatcaatctgcactccctttggtgtggcaagcttcgtatctaactgtaaatcaagagagcctcttggctgaagcttaaattcaacaagatgatcaaccatccttttggtgttatttatcagctcatcaaatacattagttttcttcataagaactcttgcttattttttgtatttgttcatcggcattggtcaaaatacgaaaagtcactctttttgatgcaccagcattctctagcccagactcatttttgatggttttggcagaagataagcccactgctgccaaatgtgtctttatccatggacgatactgactgacctcaggtatggcataagcaaattgtaaaacggtacgggtgcggtcttgtgataaccgcatgttctcaaagtaagcaatatcagcatccactcccgccgcccattcgctgctggtatgaccctcgatacggatttcgttaatgctatctttatagcggtcgatgactttgatatagcgtgggaaaaaatcagataaaatttctttataattatcctgcaaatcagattgacctgttttaaataaaatatcaggagacaaaaatgagatggttaatgtatctttatctatctttgctccccatttgggcaaatcgtctgcaaattcgtgtaacaatgctttataaatttgctcttgggtatcctgatattcttcagcgatttgccgcacttgcaaaattaagctgatggcaatgaacaaaaataacaccattaatccactcatcaaatctgatatgggcaaccgctgagtactctcttctgatgactgtcttgaagatagcacacttaatctcatcttgtttattattgtcatcgcattggtcttccgtgacgaatgatattattcatatgattgaccaactctttataatctttggtaaattggcttgtcatactaattaaggcgctacccatttgctgcaaatctgactcaatttttttggcttcagcggtattaaaattattaatttgaccctctatgctgtcactgatgtcctctaaggtttgggcagcgatatttgataactgattcatctgctctttgatactgccggcgtgcttttctgtgatatttttgatatcaatctcaagttgaccaaccagccgctccagtgtgttttttagctcttgagtggtgctttgcatgatgctaggctgtgctttgatagattgatgaatctgatgaaactgttcggtcagcttttggctggcatcatccatgccctgaagcatggtatcgatttgctcacttaagctcggtagagcagcaactgccttatctttcatatcagcaaaagcagccaagtgatcatacaaagtatcaatttgcgtatggctcaactcaatagcaacggcaagcctttccatagaatctggaatgctctgagcatgatgtgcaatatgtgataaattatcatgaatattgtcaatggcttgttgtgttgctgcaacagcattggtatgattttgatactgaacctgcatttgttcaagctgttgtttataattttcttgccattgaatcaactcaaagacggcatgatttaactgcttaaagttttcaccaaactgttcggttagctgatgattaaagtctttgataagctgattgagtgccaaaatcacctcttcggtggcagatttggtcagaatttgggcagttttctcaagtttatcccacaaattagcagcaaattgctgattattttgtttgacatattcatgatgcgtggttaatgcttgtaacaactcttcatgaataacagcggtctttttttgtgtgttggtttgctctgtaagatggtgttcaataaatttaagtatattgctggcatccacttggtctaaatcaagattttcgcttttatcttgatgaatagatgcccaaatttttaggataattgataataataaccccgtcacgctagtaataaaggcggttttcatgcccgagatgatgtcattgatatgagatttgatatcactatcatcaaaggcaagtaaagccaatacaataccaaaaaaagttcccaaaatgccgatggatgtcagcaatgtgggaatactgtcgataaaatgcctaggtttatgaccatcatcacgaccgacagcaacccaccctatgataaataaccctaacatgaccaacaaaaatgccatattaataggtgccgtgatgacatcaaataaaagtgcaaaagtagacataattcaccttaatccgagtgcttaattgtgggtatcttatcactaatcttgtgattcatgagatagcatttctgcctgatgagacggtatttttacttgggggtcgctcggtactcgatgccagtgggtgcgtgcccccagtaaaccactttcactatttttggcttcttgctgtagatgctttgcataatacgccaaatcctcttctgtattataatcatcataagggttatgtttgatatgatcagacatataatcaaggcgtttttgataaattacctcacgatactgttcaaactctgccagcttatcataataaggtttaagtttaaggtttagcccctcaatctcttgggtcaaataggtcatctgttttgccaatttaaccaaattttcatcatactctaaatgtgcatcttccaacgctttgatttgctgcttatgataagcaatagacttttggatatgctcataggtttttgttccctctagcgtataatcatgctctgatcctacaactttaacctttaaaatatccaaatccctttggacttgttcaagcttagcaagccgttcttcttcatattcctgacgaccattctgcttgcttttgtattctttatcgatggcttgcagctcatcacttaacgcctgtttttcatgactccatttataataatttttaccatactttgccaaataagcctgctcttgtgcatctatttctgccaatgccaattctgttacttcttgattatacgcacggttatgaaactctgcatgtgagtctttatattctttggcacgccccaaaaaataagcttgctgagccatatggtctgatttttctttatctcgtttttgtctttcttgagacccatattcagaaatattgttattatacctgaccatcatggcttcaaattcagcaggaaatgctgttgtggtaggtaaaaggctactgcttcgctcggtagggtttaaatattcatcaaaaacccctcgctcgtattttagccatttttcttgtagaatttctgaaaaataaagctgtacagatttggtctgaaaaaacttacctaaaatcaaaattaagcccaaacccagtaagaaaaaatccactgcttgtttaactttttgataggcggagtctttttctaactgctcaatggctcgttcacgaaataatggactgtctttggcaaccttaatcccaagtgctgttaatacaccttcatctaatgtcttgtcattatacccaatgatgacatcctcaattttcttttctttgtcattacgatctttgatgagtgtctctaattctgctttatgctcaaggatttcattttccaaattttgggcaatagggcctttgcctcgacctgtaccacgcccaccactaatttcggtatccaatttgacacgcaggctattaattttctcttttttggcacgaatttcatcatcaattttaccgatgatttcatttttggcagactcaatactctgttcgtattgttcaaattgtttttgttcaatatcggttttaaataaaatttgtgttaaaaatggtgcggtaacatacaaagagccaagaataatagccaaacggcacaccaagaatagataaattttaaggcttcttaaataataccaaaaaccctgcaccttacccacaaaaccagaagacgcttgaggcttttcaatattgtgaagatatggtaatagctgtctttatgtttatcttctaaaaaatcggctgtaatcatttgccgatcaaaaaatagcaacgcaaagccaacaaagcagcccaagccaattctacccagccatgggttatcatgagtaaaagtactgcccaaatgcccccatgcaaaaccctcagcaaatgcagccataaaaacaagaaccgagataatggtcaaataacttgctgcccctttggttaaaagcttatcatagtacacttttaaagtcagccaataccaaaaacgcaacaaaatactgggttttttattgatatttgctaaattatcggggggggggggagaacttggttcattttatatcatctccatgatgttaactgtctggcttatccatcaaaacccgcccaatatcgggtgaatttggtaaatttttgccaacaaaataggggtatttttaagttaaaaagattaaattaagtttttcgaggattgtataatcaatgcttaattaaaataaaaaaaataatcaatcaaggttggttaagaaaaattaagcaagccaatagcgtattatcgcacgctttaattcaccaatcaagacaaaaagcttagtatcacttacaattaagcaatacatcagttagtatatttcgtacattgattaatcaatacagtcatcaataaatagtcgtcaataaatagttaatacatctgctaaagaatatgctaaacttgtgccatcatcttgcttattttggagttcatatgagtagccttaccgccgatcaggtcgcccttcaacttgacagcttaccaggatggtcgcttgatggtcatagcttggttaaaacttatcattttaaaagctttgctgatgccataagctttatggtgcgtgtggcattttatgctgaaatactagaacactaccccatttgggaaaataatcacaccagcattttggtacgcatcggtacagctgaccagcatgccgttcaaagccgtgatgtccaattagccaagcggatgcaaagtgcttttgctgcctaattttacttttacccaaatcatttttaaaacaaaccgccttctttaagatgccaagcggtgtgccattgcttttttataaccaatcttggtatcatagccgatacattttgattaagtaataataaagcagtttatgacaacacagattgatactcgttcggtgagcgactttaccgaatacgcttacctaaattatgccatgtatgtcatcatggatagagcgttgccgcacattgctgatggactaaaacctgtccagcgacgcatcgtctatgccatgagtgagcttggattaaaacataccgccaaacccaaaaaatccgctcgtacggttggcgatgtcttgggcaaatatcacccacatggcgacagtgcctgctatgaagccatggtgctgatggcacagccgtttagttaccgctatccgctgattactggacaaggcaactggggcagtcctgatgacccaaaatcctttgccgccatgcgatataccgaagctaatatgagccgatatgccgatatactgcttggtgagattgagcaaggcacggttgattggcaagacaattttgatggctcattgtccgaacctgtcacattgcccgcccgcctgcctaatattttattaaatggcacgacaggcatcgccgtgggcatggcaacagacattccaccgcataacctacacgaggttgtcaaagcctgtattcgcttattaaaaaatccagagctgtccaccaaacagcttgtacaaacactgcctgcacctgatttaccaacaacggctgagatcatcacgcccaaaaacgacatgatcgccatgtacgaaacaggcaagggcagctataagatgcgtgccacttatcacaccgacccaaaacaaaaccaccttgttatcatcaacgccctgccttatcaagtttcaggtaataaagttgtcgagcaaatcgccaaactgatgatggataaaaaattgccttgggttaccgaaatccgtgatgaatcagataaccttaatccttgccgtattgtcattgagcttaaaaaaagcaagcttaatattgataaaatcatgagccatctatttgccaacaccgaccttgaaaccagctatcgggtcaatatgaatatgattggtatcaatggcaagcctgaggtaaaaaacctaaaaagtatcttactagaatggctatcggtacgaaaaagtgtggtgattcgccgcttgcagtatcgtttggataaaatcaatgaacgattgcacattttggcaggattactgatcgcttatctgaatattgacgagattattgacatcattcgcaccgcagaagaccccaagattgagctgatgacacgatttggactcacccaaactcaagccaatgccattttagatatcaaacttcgccagcttgccaaattagaagaaattgagctaactgccgaacacgatcgcctagaagctgagcgtctactcatcagcgagcagctaaataaccccgaaatgctcaccaagctacttattgatgagctgacagccgatgccaaaacgcatggcgatgctcgtcgctcacctgtggtacagcgagcagaatccagtagcctaaaagcagtggatttgattgccagtgagccaattactgctattttatctcaagctggctggattcgagctgccaagggtcatcatgcagaccctgccgagatgaactaccgtaccggtgatgcttatttaacacacgctttaggcaaatctaccgagcggcttattttggttgataatactggtcgcagttatgggcttgatagcatacatctaccatcagcacgcacccaaggcgaccctattaccagtcttttaaacttgcctgcgggtgccaaaattgatcaattgcttttttataatcagaccaatggtagcccaaatgtcttaatggcaagcagtttgggttatggatttatcaatcagcttgcaaacttagacactgcccaaaaatcaggcaaaagtagcattaatcttgctgatggtgtacttttgcccattgttgtcatgcaagatgatgacagtttggtcgctgtcagcttatcaaatggtaacctgcttatctttgcaagcgatgagctacccaaacttgctaagggtaaaggcaataagcttgccaacctaaaagctggcgaaaccatcactgccatcacagctttatcggatactgatgccttggtgattacagcaggtaagcgtactttaacgcttaatcctaatgatatcgccaattatattgcacatcgtgccaaccgtggcaacccattaccaaaaggttttggcaaagtctccaatatgacaaagcttaaaaaagacaccgaataacgctgcgatttcaccgcccaagccatcttaagaccgcttgggcaaaatcggcagtttttatttgttaacccaaacctgccttttatatttgccatagcaatggcaaaatcattgtaattttttaaataaaaatatacaaaattcaccttgtacaaaaaagctctcacagcattcaagtgcagcacgccgctcagattttgccttataggcgtaaggcgtcatagcaattaagtttttaagagccgtattatccaagtgcattggtgcggtgatatatgcctggtcaaccaaacaaaattcaggtgcaagcctttgtatggatttgttggggtgatgtgcaactaccgtctcaaataacactgcacgcatatcatacaaatgattgggtgcagcaactgccaccatcaagtagccaccatcacaaagcactcgtcgtatttcatcttttggtagcggactaaaaaagctggtacacacattcatagacttatcagcaacaggtaatacagaccctgttgccaccacccaagtgatttggtttgacccatcagctttagcggcagtctgaatggctgatttggcaatatcaagcccaatcacatgatcacaaatgctgcccaaagcttgggtataataaccttcaccacacccaatatcaagtatcgttttggggcgaatatttccaatcatgtttaaaatttctgatttgagcggttgataatgctccgctgataaaaatgcacgccgtgcttgcacagcagcaggcgtatcaccaggatgtttactttttttatgttgtactaagtgtaagtttacataaccgcctttggcaacatcaaaactgtgttgattggcacattggtaggttttctttgtaaaatttagcgataaatgacaaattggacagataagcatggcattgagaattaaggaatgtggcagatagtttaacacagttatcaataaacaaaaggcttaagcgatgtgagatcacgacgcttaagccaaacacttattttttacctgccaaaatgccacttgcaatcacaagtacgataccaaccatcgccatgacgggtaagacttcatcaaaaaatatgaccccatatagcatcgagagtaccaccaccaagtagcccaatgctgataccataaatttacgcccaaccttgtaggcatgtgtcatcgataactgccctatcatcgcaaatagaccaataccaaataaataaggtagcatttggggctgtatgggtgtccatcctaccactgtactggcgatcgctgaaatgagtgttgcaagtactgcaaaataaaacacaattcgccaagaaggttcgcccaataaagacaactcacgcacctgtagatacgcatagcctgccatggcaccacttgtcagcccaatgagcgttggcaatagcccatgtccaaggatactgggtcttaaaattagcataatgccacataaacccaacatgagtgcaaaccaagttaggcgactgggaaattgcttcagaagaatgactgaaaaaattgccaaaaatatcgctgatgtgtggctaaaggtaatggcagttgccagcggcaaatgcaccaaaccaaaaaagaacataaataagctgattgtaccagccaaagaacgccaaaaatgtgcttgtggatagcgtgttgaaaattgtttttttgtcagtgcagcttgcagacctaaaacagttgcagcaaaaacaacacgccaaaaaaccaactcatattcatgcatctcaaagcgtgtgcctgtcatcttgaccagcagtcccatgatgctaaaaccaatcgcaccgactaccatccaaagtgaacctatgaccgagcctgtatcggtatgtgtggtaattttcatgtgatcttttttcatgcgatcttatcgtgcgactaatgctcccttgttgcccgaaactcaacctctggatatcgctcttgcatgagttgtaaattgacacggctgggagcaagataagtcaggtaaccaccgccgtctaccgacagctggtcgtgggcttttttcttaaatttttcaaaagcgactttatcatcagagtaaacccatcgcaccgttgcaatgctaatcggttcaaaggtgcattgcactttatattcttctaataatctgtgtgccaccacctcaaattgtagcacgcccaccgcccccaaaatcaaatcgttgttgatttgaggcataaacacttgggttgccccctcctccgagagttgttgtaagcctttttgtaattgtttggatttcatcgggtcttttagcaccacacggcgaaacagctcaggggcaaagtgcggaatgcctgtaaaattcaaggtctcgccactggtaaagctgtcgccaatttgtatcgtgccatgattgtgcagaccaatgatatcaccagcatacgcctcatctagcgtctcacggtcgcctgccaaaaacatgagagcgtccgacactcgcacctctttgccaagacgcacatggttcattttcatgccacgctcgtatttgcccgaacatactcgcataaaggcgacacggtctcggtgcttagggtccatgttggcttggattttaaagacaaaacctgtaaaggcaggttcgtccgcttttaccgtccgctctactgccacatggtcttttgggggcggtgcatattgggtcagcacatccaaaatcatgttcacaccaaaattgcctaacgccgtaccaaacagcacaggcgtttgacgacctgccaaaaattcacgctcatcccaatcttcatacgccatttgggcaagttcaatgttttctataaattcatcccataaaatctgcccaagcctgtccttaatgtcagcataatcatagccatctttactctcaatctctacaatttgtgaaccaaagccttttttataaaagtaagtcttgttatccacaaaactgtatacccccacaaagtcctgacccataccaatgggataagcaaatggcacgcatttgatttttaggacgctttcgatctcatcaagcaaggcaagcggattttgaatctcacggtcaagtttattgacaaatgagatgatgggcgtatcacgcatgcgacacacctccataagcttaatcgtccgctcctcaacgcccttagcaccgtcaatcaccataagggcagagtccacagcggtcagcgtgcggtaggtatcttctgaaaaatcggcgtgtcctggggtatctagcagattaaccacatgatttttatagggaaattgcatgaccgatgtggtgatagagatgccacgctcttgctccatgctcatccaatcggatgtggcgtggcggtcggctttgcgtccacgcacctcgcctgctacctgaattgccttgccccaaagcagcagcttttcggtcatggtggttttaccagcgtcggggtggctgatgatggcaaatgttctgcgttggttgatttcattggttaaatgggttgtcattgcttgcctttttgtagatgatgtatacattgatgtgtacggtgagatacaaaaattaaaccagtcaaataaaatgaaaattattataccataaatcacatcaagtgatgacacgattacagtcgcttaggtagcaacgacatagtacaaaccattcatccaaacacttgttttatcacaacttaacacgccaaacctaaatttatgctataattttatctaagccatatttcactctattttaatttagtattagcaatgattaagttactcaaggttatcttatgaataaatttgcccttataatcgctaccgctttaggtttatccgcctgcgttgcaccagtcagcgaccaaggtagtgcaatgatcattggcgtgcctgttggcgtgcctgttcttatcgacaaacccacccacaaccatcaagatgacaccgtccatgtctgtaaactcaaggcatttacagatacctttactgccgaaaatcagagccgtggcaaggctcgcttggcagttaagaaaaaatgtcttgccgctaaccatgaaatgttttgccgtgataacatcattgaatgtaccgaatatcactaatccaagccaaagcccatccaagcggtgggctttttgatatccaatgccccaagcggtgattttttggttataatatcaaattcttcatccaatttttaaatccaatgactgccatgacgaataccgcttacccaaatattaacagtatcccaagtcttgccaaactatccacagaccaagttgataccactcgtccgcctgtgattttggtagacggttcttattatttatttcgctgctttcatggtctaccaccgctatcaaattctcaaggattgccaaccaatgccatccgtggcgtactaaatgcactcaacaagctgattaaaaaatatcatcccacccatatggcagttgcatttgataccaaagcgcctacttttcgccacaatttgtccgaagcctataaagcacatcgtcctccgatggacgaagcattacgcatccaaattccttatattcatgagatgattgaaaaactgggcattgcactcattaagattgatggttttgaagcggatgatatcatcggcacattggcctatcaagcctgccaacaaggccatcgggtcatcatctccacaggcgataaagacatggctcagctggtgaatgattgtgtcatgcttgaagacagttttactggcaagttgaccgataacgcaggtgtgatagaaaaatttggtgtgaccagtgaacaaattgccgattatctggccttgatgggtgatgcgtctgatggtatttctggtattcctaaagttggtcaaaaaacagcggccaaattactcaatgaataccaaaatatcgatggcatcttagccaatcttgccaatatcaaaggggcagttggtaaaagcattgccgacaatcaagacagtattccactcaatcgcattttagcgaccatcgttaccaacctaaaacttgccataagctttgatgatattacgcttgaccacagccaagaaacaacaatcaagcgtgcacctgccttgtatgcactctttgaagaattagaatttaaaaaagaaatggctcaaaccgccgagctgcttaatttgccccatcagccaaccgataaagccgtatctattgatatccatgacaacaccctttcaagccaaaccccaatactacccatcaaagatatctcttatcacaccattacaacccaacaggattttaccaaactgttggataaattaaatcatacgccctactttgccattgacaccgaaaccactgatatcaattggcaacacgccaaactggttggcatttcagtgagcaccgctgattatgaaggctactacattcctgtcggccatacagcagattttgatgttttacttgataatcagttgccgattgataccgtattatcagcatttaaacccattttagaaaatccaaatatcggtaaaatcgggcaacacttaaagtatgatgcccatatttttaaaaagtatggcatcaacatatctccttggcaaatggataccatgcttgctagctatgtcatcaatgctgctgcaactcgtcatggtatggatgcactggctaagcattatttgggcgtacagaccacaacttttgaagatgttgcaggcaaaggtgccaaacagcttagttttgataaggtcgccatggatgcagcaagccagtatgcatgcgaagatgcagatattacttttcggctatttaatagatttaatcaacacatcaatcaagataaaacggctgcccaactgttataccatctagaaatgcccaccgcccaaattctaacccaaatggagcatgatggtattttaattgacactgattttttggggcaattatcagatgaatttgataaaaaaattatggcactacaaattgaggctgaacgcattgcagatgagccgtttaatttggcaagcccaaaacagcttggtgagattttatttgacaaactgggcattgcaggcggcaaaaaaaccaaaacagggcaatacgccacttcagaagctgtattatcaaaaattgaacatccgctgattgatgtggtacttgaacatcgcagcttatcaaaactcaaaagcacctataccgatacgctggcaaacgccgctgatgagcaagggcgagtccacaccagttaccatcaagcgcttaccagcacaggtcgcctgtcatcatccgatccaaatctacaaaatatccccattcgcacagatacggggcgactgattcgtgaggcatttatcgcaccaaaaggtcgtatgattttggcagcagattattcacaaattgagcttaggctgatggctcattttagcggtgatgaaagcttgatccgtgcttttaatcataatttagatattcatacggcaaccgccgctgagattatgggcaaagatatcagcgaagttacaccaagtgagcgacgcgctgctaaggcggttaattttgggctattatatggcatgagtgcttttgggcttgccaaacagattgaggttgatcgagccgttgcccaagattatatcaagcggtattttgcacgatatcccgccattttagagtatatggagcgtaccaagacgatggcaaaacagttaggctatgtgcagaccattttaggtcgtaaactctactcacctgatatccaaagtagcaatcgtatgattaaagatgctgccgagcgtgcagccattaatgcaccattacaaggctcagctgctgagattatcaaacttgccatgattgcggtggatgaagtattacccaaagatgatgccaagttgttactacaagtgcatgatgagctggtttttgaggttgatactgacaaggcacatgatatcggcaacctgatcaaaacagcgatgcaaaatgccctaaccgatacagcgaaaaagctgggctgggcggttgattttgctgtcccactcgtggttgaaataggtatcggtgaaaactgggagcaggcacactaaagccatcatctgaaaccgtacaatgtgcgactaaattggtcgcatattttttgcctttttgtctggatgaatttaattaatttaattttcgccaatataaaagcaacaagctgcatcgtcaccaatgcagcttgctactttacatgattttaccaccgtaaaatctatatccttatcaaccttccatgaatagcacttcatccttgccccaatccatcagggttctcctttgctatgggtatattatgcaataaaaccatgctgatgaaaatacgccaaaatcgtcaaactttgtgcgatatttcctacaaaactcccaaagtgcgtaaaataactaggcttgtacccatgcaccatcacgccaaaccaaggcgaaacgggtcgctttaccgtctttttttgaacaaacataccgtttttgatttttacggctccatcgtaaaattgttgggttaccaacatcatctgtatctggtgcatcatacaaataataaaattttggctcaagctgatctttaatctcacgaattcacttagctttggtggacgagtttcacgaactttaggaaatttggatgccgccaaaaatagccctgctgcaccttcacgcagcacataatggtcatcaaatttttgtgaacgcagcttgggcatatcaatgggtgtcatacgaggaggggccgcctgaccatttttgagtacttttcgggtattatcacactttcggcaagcaaaatatgcaccaaaacgccccgttttaagctccatttgaccatcgcatttatcacaatcaatggtcggtgtatcactggttgcacccccaatctcaaatacacctttttcaagcacatgaccatcgcaatcagggttattaccacagatatgcagctttagcccaccgtcgacaatgtagccatccatcgcagtattgcattttgggcaacgctttttttccatgagggcgttgacctctgctgaatcatcatcagcatcaaactcaaatgccgaaactggcatcaaatttttggtacctttacagcgttctttgggtggtagattataacctgtacaacccaaaaatacacccgttgaacctgtgcgtatctgcattgggcgatggcataaatcacagtgaatatcaggcacattggttggattattaggacgcatgccatcggtggttttggcataatcaagcttttgtttgaaatcatgataaaatctgtcaagcaccgttttccaatcttcctcgccaaccgccacctcatcaagcttatcttcaagccctgcggtaaaggcataatccatcaaatcagggaaactttctaccaacctttctgtcacaatatctcccattttttcagcatataggcgtttattttcaagcttaacatagccacgctcttgaatggttgagataatagacgcataggttgatggtcgcccgataccgaggctttcaagctctttgactaagcttgcttcactgtagcgagcaggcgggctggtgaaatgctgtgttggcaaaatctcaatcaaaggcaacttttcacccactttaacagcgggcagtaagatatcatcagtcttagcaggcggctgcacctttgtatagccatcaaaaaccaaagtccgtcctttggctttaagctctatatcgccagcggcaaccatcaaattgactgactgatagcgtgctggcatcatttggcatgccacaaactgccgccaaatcaactcataaagacgctgagcatcacgctccatgccagtcagctgcgaggattttaccaaaacatgagaaggccgaatcgcttcatgcacctcttgagcattttgtttattaccataaaaattgggtttttggggcaaatagtcatcaccaaaatgatctgtaatgtattcacgcaccaaatttagggcgtcttggctcaaaaaagtagagtcggtacgcatataagtaatatgccctgcttcatacaaacgctgtgccaaaatcatggtttttttgacactaaacccaagtcgtgtactggcggcttgctggagcgttgaagtgataaagggtgctgatggacgagactgagtgggcttttcttcgatcgctgacacaataaagtctgatgagcctaacgccaaaacaacttcatcggcttgtgctttattgccaagttttagcgttttaccattttttttgaccgcttcaaggtttagcgtctcgcctgctgcggtgttattggtgtgaattttccaatattcaacagggacaaatgcccgaatttcttcgtcacgctcaaccaccaaacgagttgcgacactttgcactcggcccgctgacagacctcgggcaatctttgcccaaagtagtggtgataccataaagcccaccacacgatccaaaaatctgcgagcttgctgtgcattgacacgatcaatgtttaattgatcaggatgctcaaaggctgtttggatggctgttttggtaatttcattaaataccacacggctgtatttatcatcactgccgccaatcacttcttttaaatgccacgcaatcgcctcaccctctctgtctaaatcggtggcaagataaattttatcggcctccttggcaagtgcttttagttcacgaatcaccttggttttgtttggcaatatctcatacaccgccgcccagtcatgttcagggtcaacacccatacggcgaactaatgctttttgggctttttcttcacgagacaagccaacatcttgggttttgttggttttggtcgcactgccaccaacgggtagatcacgcacatgacccacgcttgaacgcaccacataatctttacccaaatatttattaatggttttggcttttgcaggcgactccacaatcactaaggatttgccccgagcattggctttggtcaatgctgcctcagctttggtggtcgtttttttagaagttgccatgattatgcctttatttaaatttgctaaatatctgagaatttatccagaatccctagggtgaatgggtatccatgtgcatttatagggtgcaaatgtggttttgtcaatcattttataaaaatttgctcaaagttttcgcaaaaacaatcacgcccatcagggcgatttgccaccatcaatcaattttgcccaagccatcagctgggttttgatgtcgtttaagtcggattgagcttttattttatccagcttataagccttttggctgagttggtatttatcatccaaccagtaaagcgagatatgatttgctttcattgacagtcccagaacttgagccttgatatgttcaggcagatgtatgggctgctcatcaaggcggcgtacttgtgtcagcatctttggcgtataaaactgctgcggtatcagatgccaacaacctgccatgacatgatattgagccattggtagcctaaggtcttctatgatgacagtgtactgagcaacccaaggcatgctatctgctctggcatacgcatcttttttggtgggtttgagtgcatcatacctatctttaagccaatttgggcaagtgataagcttaggaaaaataccaaaatgacgcaccatcagccgaaaatctgccactcgcatttgattggcattggggcgagctgccataaaattgcccacccaaaaaccagcaacaacaagcacaacaataacagcgatactttcgcttgatagtgacatcatatcatcctacaaaagcagctgacgcttgccactgttatccatcgatgagaccagtccacgctcttccatttgatcaagcagacgcgcagatcgattgtatccgatgctaaacttacgctgcaccgatgagatggatggctttttagtctcaaccacaaaagccgctgccgcctcatataactcatcgcctgcaacgctaccacctgcatcaccgctaccctcaccttcaaaagaataactgtcagataaatcaatatagtcaggcttgccacgctcacgccaagcatcacagactcgattgacctcatcgtcatccacataagcaccatgcacacgctcaggatgatttttacccggcccaatgaacatcatatcgccatgccccaacatatcctcagcgccaccttcttcgatgattgtgcgactatcaactttagagctgacacgcaggcaacacgagcaggaatattcgccttaatcaaacctgttaccacattcaccgtcgggcgttgggtagcaagcaataaatgaataccagcggcgcgtgctttttgtgccaaacgcacaatcggctcttcggcagttttaccaagctgcatgatcatatcggcaaattcatccgccacaatcacaatcgttggcagtggcttaagcttgggcggcttatcttggctgacactttgattaatgtgccataaagggtcataaattggttcaccctcagcttcggcgacttccacttttttattaaattcactgatttttcgcactcgaagcttgctcatcagctgataacggcgttccatttcattgacacaccaagtcaaagcagcaaccgcatctttcatatcagtgatgacaggggtcaatagatgcggaatgtcgccatagttggcaagttcaagctgttttgggtcaatgagtacaagtttaagctcatcgggcgtgtattttagtagcatagataataaaaatgagttcaccaataccgatttacccgaccctgtcgtgcctgccaccagcatatggggtgcttttgccaaatcagcaatcacaggcttgccgctgatgtctttaccgacagcgatggcaatttggttatttggactttgataatctttagtatccaacagctcaagcaaatgcaccatctcacgcttttgattgggtacctcaataccaatatacggcttacctggaatcacctcaaccacacgcaaagatgctttggacatcgagcgtgccaaatcctgagagatgcgtgtgactcggcttgccttgacacccggtgcaagctcaacctcaaagcgtgtgaccacagggccaaccatggctgagacaacttgagcttgaatattaaattcttgaagtttaatctccaaaagctctgaagcttgctgcagttcatcatcgctcactttaggtttattggataaattgggcttatctaataagtccagctcaggaatcggtgttaaactcaaacgatagcttaaggtatccatcgcacgagactgtacaggcgttgctgactgttttggtttgggtgtctgatgcgtctgctcttggttaggcttggtgtccttggttgttttaacttcagtcgcctgattttcatcaaagttggggccaactttttgaattgttttaaatcgctctacggttgatgggttgttattaatgacgatctggttggacgactcatttagctcacccaaatgcgttgcgtcatccaacttatcatgacgatacttcatcgggtcagttgtagctgcttgttgcgtttcttggtaaatgttttccgcttctgctttggcagcttgtttgctggcttcattatcacgctcagcgattagctcatcacgcaatccagaatggcgtaaaaagctctcaagcacaccttcatgattatgcggtgtgcttaccaccgccgatgtaacagggcttgtactttcatctggtatggtactgatggtactgtttgcactttctggtttaggctccaagtctactttgggggtggatttatcgccgccaatccaatgaaaaaccagacccatcagataacgccaacgaatctcaaagctcaacaaagagatgaggataattattccgatcaaaagtagagccgttaccgtcccgccaaaaataccagccaagcttttttgtagctcaaacccaatcgccccgcccaaacgggttgcaagcaaagcatttgtcatctcaccaatataagcaagcaaggcactgacaaataatatcaacagcccataggcaaataatcttagtacccaaaatagcttaacatgcgaccaccatagccgaaccagctcatatgccagcaccagcacagccacccatgccccaaaaccaaataaggtatgcaaaatatctgatacccaagcaccaagtagcccaccgacattattaatggttgaatggctgccaacatgtgaccatgccgaatccgtctgatcataagacagcagcgataaaaataaaaataccaacaatacaatgccaaaaatgctaaaaatcagttgcttaatggtaggtagcttacccataaagcgggcaatggtcggattttgaaatagattactcatgatgactcgttggcaggcgataggtgtctttttgacataactgtctattatagcgaatttgattcaattagccaaacatttgcaaattgttatacagtatcaaataaagccgtgcctttataccgcttatgccattggcttgtttataaaattgcttgtttatcaaaattaatagcgatcaccctaagggcatatttgcttctccgatacccaaagcacgccctgaattattgataatagtaataaatatagaaaaaattacgaaaaatattttgtctttatgcatttttagggtagaattatcttgataattttttttatgaaactgtatagattttttctgacctttgtactaatttgcacctttttaggatttttcatgaccgattcacgccccattgctctggacttacaagacattcataaaagctatggctcacttgaggtgttaaaaggtgtgtctttgaccgcatacgatggtgatgtgatcagtattttaggctcatcaggctctggtaagtccaccttgcttcgctgcatcaatctgcttgaaaagcctacctcgggaaaaatcattgtcggtcaagagacattaaaacttaaatcacataaaggcgaattggttgcagccgataataaacaacttgaaaaactacgctcaaaaattggctttgtgtttcaaaatttcaatttgtggccgcacaaaaccattttacaaaatatcatcgaaggccctacgcaagtgcttggtatctcaaaagctgacgccatcaaagatgccgaacggcttttgaccaaggttggtcttttggataaaaaagatgcctatcctgacaatttgtcaggcggtcagcgtcagcgtgtcgcaatcgctcgctcgcttgccatgcagccacaagtactgctgtttgatgaacccacctcggcactagaccctgagctggtcaatgaagtacttgctgtcatgcgtgagctggccgacgagggtcgtaccatgctcattgtcacgcacgagatgcgttttgctcgtgaagtctcaagcaaagtggtatttttacaccaaggtcgcattgaagagattggcacaccaaaagaagtatttgaccacccaaaatctgcacgcgtacgagaatttatggcatcgcaccgctaattttattgtcgccaatttttattaacccaaggaattatcatgataaaaccatttgccactttggcaactgtcgcttgtgttactttggcgggttgtaccaaagaagaaaccagcacccaaacaacagcacccgctcagccaagccaaaaaagcattgtgatcgcaactgaagccgcctacccaccatttaatgacacggatgccagcggtcagattatcggttttgatgtggatgtgatgaatgccttatgtgccgaaatgcacgctcactgtcagataattgctcaggattgggatggcttaatcccaagcttattggcaggcaaatatgacgccatcatcgcaggcatgtccatcaccccagagcgtcaagcacaagtagatttttcggactcttatttttcaaatacgatcgtttggcttgccaaaagtgatggcagctttgatcccaataatatcaccaatcaaacccttgccagtcagcgtggtactactggtgctgcctatatcaccgaaaaatatgatggtaaagatggcaatcgtgttcagctgcatgacacctacaccaatgcttatttggacacaaaagcaggacgcaatcatgcagtcatggctgaaaaagtatcggctattgactggctaaagcaagagggcaatggtgagtttggcttaatcggcgaagagattgataataacgatcacttgggtatcgccgtacgcaaaggcgacagcctaaaagctgagtttgatgcagctttagcaaaaatcaaagaaagcggtaaattggcagaaattgaaaaagctcactttcaatcagatactttttaagtttggcacacctacttttggtgtgtcgattatccattcttgcatattaagcatattaagaggtgatcatgacaaccgtgttaaaatttaccacagccgcattttgtgtttctttacttgctgcttgtagcaatgagtctacgaccaataccaaaactgctgctgcacctaacagctcgacctcacaaaaagaattgattatcgctactgaatctagctttaagccatttagctatcttgacaagcaaggtcaattggtcggctttgagattgatttggcaaatgcactatgcaagcagatgcaagcagattgtcaaatcgtaagccaagactgggacagtcttattccaagcttgaacgccaataagtctgatgccatcatggcgggtatgtccattaccgaagaacgcctaaatgcagtggactttagtgagccttattttgataatacgcttgttttgattggtaagaaagacaataccgccaccatcaatgacatcgctggtaaagctgttgcaacgcagcaggcaactgtttcagcggaatatcttcaaaaacattatccagacgccaacatcaaaacttatgataagcaagacaacgcttatcttgatttgaccgctgggcgtgttgaatttatgttgtctgatgtcgtgcctgctactgactggcttgccactgaagctggctctgaatttgagatcaaaggcatgcccattgatatcggtgataaagtcggtatcgctgtgcgtaaagatagcagcctaaaagcggattttgacgctgcacttgccagcctaaaaactaatggcaaatatgatgagattgttgccaaatactttaacagccaagcattaggtcaataattttaagccgatggtgtttggttttagtcaagtcacgctacaccatcaaaatttaagtcacaccaaatcaaggagtagattgtgaaatttaaaacatttggacttatggcagccattgttggtacatttagtatctcagcttgtagcggtcaaaacgaacaaagcacaaaagccagtggtgacaccttgcgtattgcgaccgaaggcacttatgcaccatttaactacaccaatccagatggcagtttgggcggctttgatgtggatatcgccaatgcgttatgcaacaaaatgcaaaccgaatgccaaatcattgcccaagattgggacggtattataccagcattaaaaacaggtaagtttgatgccattgttgcagcaatgtcagtcacccctgagcgtagtgagcaggtggattttagcgagccttattttgtcaactctttggtatttttggcaaaaaaaggttcaaattttgatccgagcagcaccgatgccatcaataatgccaaaattgttgctcagcgttcaaccatctcaagtcaatggttaacccaaacttatccaaacagcaagccacagctgtacgatacgctggacaatgcttttattgatttaggtaatgagcgtgctgacgctatgatttctgacaaactgccagcattaacttggcttagctcggacttgggtcaaaattttgagatcaaaggtggggacattaatatcaatgataaagtctccattgctgtcgataaaggcaataccgcactattacaaaaattcaatgaggctttggctgcaatcaaggctgatggcacctataaacaaattgtcattaagcactttggtgaagcaggtatgccaactaatattgaataatgaataagactgccaaaaaggcataaaatgctgtgctttcggcggtaaaatccatcgccgaaagttgctttttatatggtaatttgatttttgtgacaccatcttttaatgattggctaagcaggttgcttaaaataaaacaaaccacagcaatcaactgatggtattttataatttaaggtactagcgtgtttgacttacaaggctacggcccaattttattgcaaggtacaattctgaccataaagcttgggcttgccagtttggtatttggtctgttattcggtttgcttggtgcacttgccaagctttctggcgtttggatattacaaaaaattgccgatgcctatacaacaatcgtccgtggcatacctgagcttttgatggtttttttcatcttctttggcggtagtatcattttagtcaccattgcaaagcaaatgggctatacaggacgcattgatgtgagtcaattttgggcaggcgttactgccctatctatcatgtttggtgcttatgcgaccgaagtttttcgcatggcaattcaagacattcccaaaggacaatgggagtctgcccaaagcatcggtatgacgccaatacagacattgacacgcattattctacctcaaatgtggatggtggcactacctggtcttggcaacttaactttggtactacttaaagatacagccttggtttcgttgattggtttacaagatttaatgtattttgcacagcgtgcagcacaatccacccaaaaaccttttacattttatttagctgctgcttttatctatttggctttgacttcggtgattacactttttatcatgtggtgtgaatctcgtgccaaccctgccgcacggtatgccaagctacttcataaacgctcagggggtcaatcatgaattggaattggcaagcaatcattaactattttccagatttactcgcagcatcggttacgaccattgagcttgtggtcctgtcttgtgctttgggtcttgtatttggtgtgattcttgggctatggcgactgtctccagtattgtggcttcgtgccattccagcgacttatatttttttctttcgtggcacgcctttattggttcagatttttttaatttactatggcttgggtcagtttaccgcactcaaagagtcctttctttgggatccaatttttagtcaagcatactggtgtgccatcatcgcctttaccttaaatacttcggcctatatcggtgaaatcgttcgtggtgcggtcatggctgtgcctactggggaattggaagccgccgacgccattggtatgtcaaaacagcaaaaattacaccgtgtcatcctacctcgtgcctttggtatcatgatacctgcttatagcaatgaagtgatatttatgctaaaggggagtgctttggcagcatcaattacggtggttgagctgacgcacaaggcacgagacatcatttccattacttatcttcatttggagatgttttttgccgctggtatgatttatttggtgatcagctgggtgtttttattcatttttcgccaatttgagcaccgtgtcaatcgtcataaacgctatatcccacctgcggtaaatcctaatccaccgatttaatttaaggaagactgatgacactacataccattattttagctgctggtaaaggcacacgcatgaaatccaaccgacccaaagttttacaaaccttggcaggcaaggctttggttcagcatgttttggatacttgtacacaaattcaagcagatggtacgattttggtttatggctttggcggtgagatggtcaaagaggcactatctacccatacagttatatttgccgaacaaacacagcagttaggcacaggtcatgcggtcaagatggcattaccccatctgccaaaagaaggtaaaagcctgattttatatggtgatgtacctttaactcaggccgaaaccttacaaaaccttgttaaagccaataccagcggtatctcaatgctgactttaacagttgaacagccgtttggtttgggtcggattgtccgagatcagggtaaagttgttgccatcgttgaagaaaaagatgccgatgtacaacaaaaattaatcacagagattaacagtggcatctattgtgtggataatgcgttgcttcataaatatctacccatactgaacaataacaatgctcaaggcgaatattatttgacagatattatcaaattggctgttgatgatggcgttgaaattgtaaccattgaacctaagtttgcctttgaaattgaaggcgtgaatgatcgtattcagcttgccaatcttgagcgagattttcaatcacaccaaattcatcaattacaaatcgctggcgtacagtttgccgacccaaatcgtgtcgatattcgtggcaaattgacctgcgatcgagatgtttttattgatattaatacagtatttgtcggtgatgtccatctgggcatgggcgtgcagattgatgcaggcaatgtcattacaaatagtcatattggcaaccaaacacatattaaacccaactgtgtcattgatgatagtatgattggtcaaaatgttagcattggaccatttgcccatataagaccaaaaaccatactatcagatgatgtcaaaattggtaattttgtagaaactaagaaaacgaccgtaggtgttggcagtaagattaatcatctaagctatgctggcgatagtatcatcgggcaaaatgtcaatattggtgctggtgtaattacctgtaactatgatggcatcaataagtttaccaccacaattggtgatcgtgcgttcatcggcagtaattcaagcttagttgctcctgtgactgtcggtatgggtgcaacaatcggtgcaggatcagtcatcaccaaagatgccaaagacaatgctttgaccttggctagagcgaaacaagccaccattatcggttggtcacgccccaaaaaaaatcaagtttagtgctttggtattgatttttaacttaatcatgaaaaagtttttaacttcaataaaagccagctaaaccaaaggttaaagcataaaaatcaaaagctgaccatgattatgcctaaaagtcataccatttgaacaaaaaaattatcaaaaaaagggtttattaactaaaccctttttaaaattgtctttataaaatgacttaaatatgatgaaaattcaccaaattatcaatcttttttacgaccaaaacgcttacgctcattttcagtcaaataccgcttgcggatacggatcgatttaggtgtcacctcaaccaattcatcatcttcgataaactcaagtgcctgctcaagtgtataatccagcgctggggttaaaataatcgcatcatcagagcctgacgctcgaatattagtcaactgcttggccttggtcgggtttaccaccatgtcatctgaacgagaattaatgccaataatcatgccttcatacacttcaagctgtggcttagcaaacaaacgaccacgctcttgtaggctaaataaagcataagccaaacaggtacctgttaccattgataccagcacaccattttgacgcttggctaccgcaccatctttgacaggaccatagtggctaaagctggaagtcataatacctgtgcctgaagtcatggtcaaaaacgccgagcgaaaaccaattaagccacgagaaggcacagtagcttcaatacgaatacgacctttgccgtcaacctccatattcgtcagctcacctttacggttgcccatctcctgcatgactgctccttgatgctgttcctcaacatcaaaagtaacattttcatacggttcacacatgacgccatcaatctctttcatgatgacttgcgggcgtgatacgccaagctcaaaaccttcacgacgcatattttcaatcaataccgacaaatgtaactcgccacgacctgaaactttaaatttttcagggctgtctgtatcttcaacacgcagtgcaacattatgaatcaattcacggtcaaggcgttcacggatattacgagaagttacaaacttaccttctttgccagcaaatggtgagtcgttaacctgaaaagtcatcgagaccgtcggctcatcaacagacagtgctggcagggcttcaacatgttgtgggtcacaaatcgtatcagagatgttcaaagaatcaatacctgtaatacagataatgtctcctgcctgagccgattcaacatcaacacgctcaagaccatggtagcccataatttttaaaattcgtccattgcgcttattgccatctttatcaatgattgcaacgggcgtatttgtttttacagagcctctttgaatacgaccaaccccaatcaccccaacaaagctattgtagtcaaggcttgatatttgcatttgaaatggaccgtcgacatccaccttaggaggctcaacgatatcaacaatcgtctcaaatagtggcgtcatatcatcagcaagattatctggttcaagtcctgcaatcccattaatacccgatgcatagacaataggaaaatctaactgctcatcagtcgcatctaaactgtcaaacaaatcaaagacttggtcaattacccaatctgcacgagcggctggcttgtcaattttgttaatgacaacaatcggtttaagtccacgagcaaatgctttttgagtcacaaatcgtgtttgtggcatgggaccttcttgagaatccaccaataataatacacagtcaaccatcgacatgacacgctcaacctcgccaccaaaatcggcatgccctggggtatcaacgatattgatacgatactcagtgttagtacgcttatcagtccatcgaatggcggtattttttgccagaatcgtaatccctcgttcagactcaagggcatttgagtccatcacgcgttcgatttcaccagaacgctcacccaaagcgcctgattgctgtaaaagtttatcaactaaggtagttttaccgtggtcaacgtgagcgatgattgcaatattgcgtaaatgcttaatgtcgtctgccataaatactcatataaagattaatagtcgtgcgatatgcccgaactgataaaaggcttaaaaataactcaattgataaaatcagtcagttggcttaactcatctgatttattcaaaagctaagaaaaccgcttattataacataaatcagtctaactgaaccaaaaatttacaccaaataaaaaagccaccaaaaaggtggcttttttatcgataaggcttgagaattcaagctgattaccaaatactcatgtgcaattattgaacaatcatatctttggtttgatcaacagtcgttgttttgctaccagtgattactgcttctacacgacggttcatcgctttaccttcagcagtagtatttggagcgataggacgatcaaagccataaccaactgcatttaggcggtttggagcgataccaaattcgttagatagcattgatttaacagcattagcacgagcttcagatagacgctggttgtagcgtgcacttgagcgtgctgaatcgcgtgatgcgtgaccttcaatggttgcagttgcatttgggaattcacgcatttgcgcagcaaccttagcaacttcttcacggtattgtggtttgatgattgatttatcataatcaaggaatacacgcaactcttggcgaagctcttctaccaaattaacctgtactgggcaaccgcgtggatcaacaacagtgtttactggagttcctgggcaggcatccagatgatcaggcacaccatctccgtctgaatcaacaacaatatcttcaattacagctggtgcttcctcaatgacaggctcaggttctggtttaggaaggatcacaggtgctggagcaacaactggttcagcaacaggttctgccactggtgctactggtactgcaggtgccaaacgaccacccaaagttacctctaaaccagccaacgccaagccttcccaccatttgttatcaaaattatggatagcacgggcttcaccactttttgcaagggcatcattgactaagtagcgagctccaagacctaagttaccgacggtgtctttagactcagcaacttcttgacctgcttttacaacttgcttttctgcaatgttttgcccattggctacttctgctgtataaccatcaattgcatttactttaattttagattgacctgcaccaaccaagacatagggcttgaatttatttgttggattgtagccactgaactgctcagtaccaatcaaaaagttaccgctgatggtttcttgctcagcatcaaagcgatgtgcagatttgtctgaagattttgcatcacggttagagataccatattcaacttggaattgagttgatggcgtaagttcgataccaatcgcagcaccagtccatagctcactgtccagtgcgacaccgccattagctggtgcaggtgcattagtagcatctagctctagcttcttgccagtgcgtaagattttgcgttgatcattgtgggcttcgtcagtgtaatgatagccaagtagtagtgggctgactgtcacaccagcttgagcagcaactggagctgcaactggagctgcaacggctgcgatgaccgcaagagcgtttatatccctttttcataaattcctccaaggaatggttggtttttcaagattaccgcacctattttagcatagcgatccaagacctgccaataatctgttacaaaattttgcagattcttagtgactaatgagtcaaaccaataggtattcattgtggcttgtgggcttagcttaatggtaaatgaatttttttacaacctttttttgaacaaaaatacataatattacacaatagtcatcattatttacgattttctttctaacgcatcaatgattggtcgttttatcttgaataaaagccattttcattgccttgactgcattatcaagccccataaatatcgcatctgaaatcaatgcatgcccgatattcagctcatgaataccatcaatttgggcaatcgctgcaacattatcacgcgtcaaaccatgacctgcattaatcaataatgatgattttttttgtgccattgcaacggctttttgaatacggtcaagctctttatcaacaagcttttgattattttgtaaagtcgcttgagcataagctcccgtatgcagctcaatcgcatcagcacccaaagcaattgcagcatcaatttgatgcggatctggatcgatgaataaagaaaccttaatatccgcctgctgaagactgtgtataaatgcttgaatatttgataaattggcgatatcaagcccaccttctgtagtcagctcttggcgtttttctggtactaaacacacccatgctggtcgtacctttagggcaatatttagcatctcatcagtgactgccatctcaagattcatgcgtgttgtcaattgcccaatcaattcataaacatcttcatcttgaatatgtcgacgatcttctcgcaaatgcaaggtaatccctgatgcgcccgcttgctcacaaatcagcgctcctttaatggggcaaggatagccgacacctcgtgcatttcgtaatgtggcaatgtgatcgatattgacacctaataatggtatattcatcatattccttaatgtagttaaatcgctattgcaaatattggatactttgttgccataatgtgcgactatgtaagggctgatggttcaataaattatccaaaactgccttttggatttggctaaattgatccaaaaactccaaagcaagttctggctcttccattgcagcacccatctgtaaaatttgtgagcctgtataacatacgccatcaaaccgaatcttagggtcaatttgcgtccgtacaagatgtgctaacataaaacccatttgaggtataaagcaatacatggcatcggcattgatcggcacaccatgcccatcaacacaaaaatccatcataaccccaagctctgaaaacagtcctctttcaaagctgcgtaagtaaagcttcattgcctgcatcttatctactgccatcagcgataaccgatccaatgcatgaagtttggtcatattggtatgataaacctgccacagcttaggacaaggactttcggtggcaagtagcttatcaagtatctcattcatatataacagtgcatactgcactcgccctgtcatcaaaccataacttgctggatgataagccgcttcgtttgactgtgctgttagttgccgcacaaattcatctgaaaatcccaagctgatttgaccaaagctttttaatgactttgtaccacttgacataagccaaatgggcgtaaacaaaggcatgccacgcccaccgataccatgtaccacgcccttttcatacgaaaagaattgataaattgcccgcttttcttgataaggacgctgatgaagcagatagccattaagtgcagtggcacgcatgaatgtatctcaaaatatttgacttaataacccaaactattgagggcgcgctcatcatcactccaaccacgcttaacttttacccataaagtcagcataatttttcggtcaaataacacttccatatctttacgggcatcaataccaacttgtttgatttttgcccctttatcgccaatgataattgatttttgacctgcacgctctacaaaaattgtcgcatcaatgaatgtcaccgctttacgccattttcctgtctctgggtctttatgtgcaggctcatctttaaaggtatcaatttgtaccgtcaaatcataaggcacttcatcaccagagatacgcatgattttttctcgaataatctctgatgctaaaaaacgctctgagcggtcggtaatttgttcagcatcaaaaatggctggtctgattggcaaatactcaccaatgacagactgtaatcgatcaagattatggcgacgaagtgcagaaacagggatgatatctgcaaaatcaaaactttcgctaaagctttcgatgacaggcaaaagttttgatttgtctttaacggtatctgctttattaatgactaagataacgggtaaattggtcgctgataacttctcaagcgttaataaatcatcttctcgccattgaatgccatcaaccacaaacagcaccacatccacatcagctaacgcagaaatggcagctttattcattcgctcattgatagcacgcacctctttactgtgaattccgggtgtatcaacaaacacaatttgcctatcttcatctgtcaagataccatgaatacgatggcgggttgtctgtggctttcttgaagtaatcgacagcttttgtccaagcatgtgattcataagcgttgatttgccaacattgggacgcccaacaattgcaacaaaccctgccctaaaagactcattttttggtgttgatcgattctcaaaaaacgccgaaatggtatcttcattgctatgggtcttggtattatcagacatatttttccttatgattgcactttggctaatatctttaaagcaaacttaactattaggcaataatttatttaattgattaatcattctttcggcacatttttgttcagcaatacggcggctggcacctgtttcgataatggggtcaacgccgacaaccgtacaatggcagcgaacgacaaacacttgattaggcgcactacccaaagtttggataagttcataagttggtaatggtaagcgattgccctgaagtagctcctgtagacgagatttggcatctttgagtacctgttcttgacctacctcttgaatcagatctttgtaccaatccatcaccatacgatgaataatattttcgccatcactgtttaaattatccaaatacacagcagcaatgagtgcctcgactgcatccgccaaaattgatgcacggtggcgacccccacctttacgctcgccaactcccaaaatcagataccgagacaattcaaggtggtcagcaatctgcacgagggtttcttggcgtactaaagctgctcgcattcgtgtaagcttgccttcatcatgcttaggatactgtgcaaataacgcttttgtaataattgagcttagcagtgcatcccccaaaaactccagacgctcatagctttttttaggatcataagaacgatgggttaaagcacgacaaagtagcgacacatctttaaaagtataaccaagcttagcataaagcacaggcaacccttgttcaaaatcagaaaaataaggcatctgatcaggagttttggtcaccttttgtgacatcttcatggtttttggtgatttatttgccaccacatactccaatcttaatcaattgtaccattacgcccaaaacttggtaatctaaaacctgactctttatgcatccaaatataagttgccttacccgacagattagattctggcacaaaaccccaaaaacgaccatcatcactacgatcacggttatcacccatcacaaaaaattgaccttcaggaatcacaattgaccattgttctccatgagaatcaaccacctctggtgagtgctcaattaaaaatggtgcttctgctgatgagtttgaatttataacatatcgtacagtataagtatggttgcccaaattttcagtttgatagcgtgccaaatattcttcttgacgcccaaaacctgctcggtctgcatcgctgagtgtttgaccatgaatcatattgggtaacattttatccaataacacacttggcatttgataattcaccgccgtcgtttctaccttttcaccattaatcgacaacaccccacgattaaagcttaccgtatctccaggcaagccaattactcgctttataaaataaatattatcattcacaggataacgaaaaacagcaacatcgcctcgtttggggttgcctgtatccaaaatcttagtatgtataattggcaaacgaagcccataagctgctttattgacaataataaaatcgcctgtgtataaagttggcaccatagaagatgatgggatattaaacggctcaatcacaaatgctcgtacaatcacaatcgccaacaaaatgggcaaaaattcataagcccaccgtacaactgcaatatgattgggaggattgcctaccaaagcagcaagtttgacacggcttgcctgataatcctgataggcgctatacaaatcacttggagcatgagcatcaggtgtataactttgggcatcactacgcatgccataatttgctaaagccagctcaagtttttgtttatgcattgaaagttgagtttcagtaaacttaacttctttggcatgatgcttgatggcaaaatgttgttttaagacaagcttatccaccaaccaaatcagcaaaaacaccaaagttatcggtacgatcactaaattaatatcaaaattcaccaaattctcctacggcaaatgcaccaaatttatacagcgacacagcatcaaaattattcaactgtcaactttcaagactgccaagaaagcctcttggggaatttcaacactgccaacttgcttcatgcgttttttacctgctttttgtttttcaagcaattttttcttacggctgacatcgccaccatagcactttgccaagacatctttacgcatggctttaaccgtgcttcttgcaatgatttgactgccaatcgctgcttgaatggccacatcaaacatttggcgaggaatcaactctttcattttttcaaccaactgattgccacggcggcgtgcatgttcttgatggcaaatcatcgccaatgcatccaccttttcgccattaatcagcacatcaacacgaaccaatttatccgcttcataacgctcaaaaccataatctaacgatgcaaaaccacggctggcagattttaatttatcaaaaaaatccatcacaacctcacccattgggatatcaaatataacctgtacttgccgtgccataaatttcatatccacttgcacacctcgacgctcaatcgccaaggtaatgacattgcctaaatattcttgaggtaccaagatatggcaacgagcgatcggctcacgaaactcagcaatgacacctgtatcaggtagtttggatgggttatctacataaataatatcaccatttttcttgacaatttcataaatgaccgatggtgctgtcgtaatcaaatcaagatcatattcacgctcaagccgctcttgaatgatttccatgtgcagcatgcccaaaaatccacagcgaaaaccaaacccaagtgcttcagaagtatcaggctcaaaaaatagtgctgcatcattaatttgaagcttttgtaatgcctcacgaaatttttcaaaatcactggaatcaatcgggaacatccctgcatagacttgaggcgtaactttttgaaatcctggaatattttctacatctggtgttttggcatgcgtaatggtatcgcccacaggagcgccttggatatccttaatccctgcaatgacaaaacctacttcgcctgcatgtagcacatcggtttctagtgattttggtgtaaaaaccccaaccgaggtcacaatgtgcgtctcaccagttgatttaataaaaattttatcgcctttggatacctgaccttcacgcacacgcaccaatgacacgacacccaaataattatcaaaccaagaatcaataatcaaagcctgcagcggtgcctcacgattaccttttggagcaggaataacatcgcacaatgttgctaataattcttcgataccaaccccagttttagcagatactctcggtgcttccacagcctcaataccaatgatatcttcaatctcttcaatcactcgctcaggttcaacttggggtaaatcaattttatttaaaacaggtaaaacctcaagcccctgttctactgctgtataacaatttgcaacactttgcgcctcaacaccttgagcagcatcaacaacaagcaatgcaccttcacaagccgctaatgaacgagatacttcgtaactaaaatccacatggccgggtgtatcaataaaattgagttgatatgtttcgccattgggatgattatagtacaaagttaccgattgtgccttgatcgtgattcctcgttcacgctcaatatccatactatctagcacttgagcttgcatctcacggtctgacaaaccaccacaaacttgaataaaacggtcggccaaagtactcttaccatgatcgatatgagcgataatagaaaaattacgaatatgggaaatatcagttggtttttttgcagtcatataaggtgcttatcaaaagaaaataaaaatcagataacagaatattctaccttatctgacaatgtttcgccatcaatttcacagattttatgggtaattagcaggtagaataaacagcacaaaaattaaacactcttccaaaaacggcagccaaaaacaatatttttatatagtttcacgataaatcaaaacagttttatcagattaaagcagccattctaaacaccacaacaatccccaagccaaatcatagttagccacatactttggcaaaccaaactggtcaattgatcgctttatgtttttattatctttaataacttatctttaatcaaaatttgtttcattcgtaaatataaataaaatattaattaaactaaagtatgctaaaggctatataggttttaaatattatcgcctttgcccaaaagcatggcataccattcattgatgctgattatgacatggacaactggtttgcccgtgccaaaggcatggagcaagaccctgagcgaggcagacgatgtaccatgtgttttgacatgcgatttgagcgcactgctctatacgcccacgagcatggttttcctgtgataaccagttctttgggcatctcacgatggaagaacatggctcagattaatgattgtggtcatcgtgccgctgccccttatgacgaccttgaatattgggattttaactggcgtaaaggcggtggcagtaatcgcatgattgagattagcaaacgagagcatttttatcaacaagaatattgtggctgtgcttactcactgcgtgataccaataattttcgccgcagccaaggacgagaacccattaagattggggttaagtattatggtgatgagccagttgaatgacggtcataacactcataaacggtcataaatggtcataacagacgcacaccaagcttttgatgagcttggcgtgtttttactgctgttttttatggtatgttttaatgagcatgatgatggtgatgtgctggctttaagtgattgtttgcggttttatctttggataccaaggttaccaccaccattgtcgttgctaaaaaggtgccttcaatgtcatgcttgccatcaaaaataagcacatcacctgaagacagcgtatgtgcttcttgaccatttaataacctgtgccaaaccattggtaacagtcaaggtaacaatgtcgtttgggtgattatggcacttcatcggggtgtctttgctaaaagttttacgcaccgtttgaatacccaattcattttgataaatgacgccttcaccctttggtaatatgcccattggctctgcatgggcaggggtgtgcaaccacgatggtgataaaacgagtattgataaaatggctgtgccaagccgtgtgttgttcattgttttgttggtgttttttatgggtcatgccctttctagatctaaaatcactttattacattaactatttatcataacttattaaatataacacaactcatggtaataaaaaactgattttattttttaaagtattatttgagataacagagcctaaattataataaaaataaacacaaagaatacccatgtcagatttatgtaaatgcaccatcacgattggccaaaaacagataacaaaatagtggatttaattaagtgctataaggtcagtctatctattggttgttatttaggttgctatatagattctgatcaccaacccccaaacaaaacccccctttgcttctgcaaagaggggtttaaaataaggtgctgacgatgacctactctcacatgggcgaaccacactaccatcggcgctaagacgtttcacttctgagttcgggaagggatcaggtggttccatcttgctattgtcgtcagcgtaaaaggattaacaacgctgtatgagtctgtttattaccaaatcaagattaaggttcatcttacatattaccaatcaacacagtcagtggtaaaccacttgggtgttgtatggtcaagccaaacgagcaattagtattggttagctacatgtatcactacacttccacacccaacctatcaacgtcgtcgtctacaacggctctttagggaaatcttatcttaaggtgggcttcccgcttagatgctttcagcggttatcccatccgaacatagctactcggcaatgccactggcgtgacaaccgaaacaccagaggttcgtccactctggtcctctcgtactaggagcagatcctctcaaatttccaacgcccacggtagatagggaccgaactgtctcacgacgttctaaacccagctcgcgtacctctttaaatggcgaacagccatacccttgggacctgcttcagccccaggatgagatgagccgacatcgaggtgccaaacaccgccgtcgatatgaactcttgggcggtatcagcctgttatccccagagtaccttttatccgttgagcgatggcccttccatacagaaccaccggatcactaagacctactttcgtacctgctcgacttgtgggtctcgcagttaagcgcgcttttgcctttatactctttgaacgatttccgaccgttctgagcgcaccttcgtactcctccgttactctttaggaggagaccgccccagtcaaactacccaccatacattgtccttggatttgttgatcctaagttagaaccccaacataaccagggtggtatttcaaggttggctccacaaatactggcgtatctgcttcaaagcctcccacctatcctacacaagttaggtcaaagttcaatgtaaagctgtagtaaaggttcacggggtctttccgtctagccgcgggtacacagcatcttcactgcgatttcgatttcactgagtctctgctggagacagcgctgccatcattatgccattcgtgcaggtcggaacttacccgacaaggaatttcgctaccttaggaccgttatagttacggccgccgtttactggggcttcgatcaagagcttcgcttacgctaaccccatcaattaaccttccagcaccgggcaggcatcacaccctatacgtccactttcgtgtttgcagagtgctgtgtttttaataaacagttgcagcagcctggtatctgcgactgccaacagctcaaagagcaagtcttatcaccatcggcagcgtaccttctcccgaagttacggtaccattttgcctagttccttcagcagagttctctcaagcgccttggtattctctacctgaccacctgtgtcggtttcgggtacgattcgtttatgactatcgcttagaagcttttcctggaagcagggtatttgccactttgccagtaaactggcttgctatcagatctcattaataaccgagcggatttgcctactcagtctaactacatccttccacctggacaaccatcgccaggctggcataaccttctccgtccctccatcgcatcataaacaagtatcggaatattaaccgatttcccatcgactacgcctttcggcctcgccttaggggtcgactcacccagccccgattaacgttggactggaacccttggtcttccggcgaacgggcttttcacccgttttgtcgttactcacgtcagcattcgctcttgtgatacctccagcacaccttacagtgcaccttcacaggcttacacaacgctcccctaccacttaattgaaacaattaaatccgcagcttcggctcctagtttgagccccgttacatcttccgcgcaggccgactcgactagtgagctattacgctttctttaaagggtggctgcttctaagccaacctcctagctgtctgtgccttcccacatcgtttcccacttaactaggaatttggggccttagctggcggtctgggttgtttccctcttgacgacggacgttagcacccgccgtctgtctcccggatattactcatcggtattcggagtttgcatcggtttggtaagtcggtgtgaccccctagccgaaacagtgctctacccccaatggtattcgtccgaggcgctacctaaatagctttcggggagaaccagctatcaccgagtttgattagcctttcacccctatccacaagtcatcccctggcttttcaacgacagtgggttcggtcctccggtgcctgttacggcactttcaacctgctcatggatagatcactcggtttcgggtctataccctgcaacttaatcgccctattaagactcggtttccctacggctcccctattcggttaaccttgctacagaatataagtcgctgacccattatacaaaaggtacgccgtcacccgaccacttaatcgttctgattgtcaaattgtgatttgacacgattcatcaagaaagttctcatacgaccattattttttatggttcgctctcgttttcttgccacttgttcattaatgtaggcttcacaataaacaatacgccatgttcttgctctggttgagtaagttgtgccattattatggtcatcaattctttgttttaaattggtggtaaaaccaacataaaactcatcatgattatccacgttttgtatgacatagacgtagtaaaaattcattgttatcctcaaaacgattaagtggtcgggctccgactgcttgtatgcacacggtttcaggttctatttcactcccctaacaggggttcttttcgcctttccctcacggtactggttcactatcggtcagtcaggagtatttagccttggaggatggtccccccatcttcagacagaatttctcgtgttccgccctacttaatatgtcgcttaaacagtttcgcatacaggactatcacctactatggttggctttcccacgccattttgctactgtaaaattgatcggctcctccgtgttcgctcgccgctacttacggaatctcatttgatgtcttttcctcggggtactgagatgtttcacttctcccggtttgccttacacagtaaactgtgtaataaccaacttatgttggttgggtttccccattcagaaatcgccgggtcacaggatattgccacctcaccgacgcttatcgcaggctatcacgtctttcatcgcctctgactgccaaggcatccaccatgtgcacttcattacttgaccatacaaccccaagtagtctgacttctaggaagtctttggtgtgtatgggtaatgtgtaacgattcacctatgtttacgcttgattcagttctctttacttttttggtgtttgtattgggtacaaacaccaggttaattatttgttggaattaaataattaacccagactcatactatgttgttaaataatgttataaacttcgtcagtttataaaataaaagcataaataagaaatcttatttaaattgcttatgtatgctttgatgtttaaacttgcttggtggagccaaggagagtcgaactcctgacctcctgcgtgcaaggcaggcgctctaccaactgagctatggccccaaaatggtgggtctaataagacttgaacttatgacccccgcgttatcaacacggtgctctaaccaactgagctatagacccgtttttaaacatcttaccaaagaacaacttgttgtggattcttgccaatcagataacttcgttaaggaggtgatccagccgcaggttcccctacggctaccttgttacgacttcaccccagtcatcgaccccaccgtggtgatcgccctcttgcgttaggctaaccacttctggtgagatcaactcccatggtgtgacgggcggtgtgtacaaggcccgggaacgtattcaccgcagcattctgatctgcgattactagcgattccgacttcatggagtcgagttgcagactccaatccggactacgattggctttttgagattagcatcacatcgctgtgtagcaaccctttgtaccaaccattgtagcacgtgtgtagccctggtcgtaagggccatgatgacttgacgtcgtccccgccttcctccagtttgtcactggcagtatccttagagttcccgaccgagtcgctggtaactaaggaaaagggttgcgctcgttgcgggacttaacccaacatctcacgacacgagctgacgacagccatgcagcacctgtatgtgaattcccgaaggcactctcgcatctctgcaagattctcactatgtcaagaccaggtaaggttcttcgcgttgcatcgaattaaaccacatgctccaccgcttgtgcgggcccccgtcaattcatttgagttttaaccttgcggccgtactccccaggcggtctacttattgcgttaactgcgtcactaagtctttaaaagacccaacgactggtagacatcgtttacggcgtggactaccagggtatctaatcctgtttgctacccacgctttcgcacctcagtgtcagtatgatgccagggagctgccttcgccatcggtattcctccagatctctacgcatttcaccgctacacctggaattctactcccctctcacctactctagttatccagtatcagatgcagttcccaggttaagcccggggctttcacatctgacttaaataaccacctacgcgcgctttacgcccagtaattccgattaacgcttgcaccctctgtattaccgcggctgctggcacagagttagccggtgcttattctgtgggtaacgtcagggcttatgggtattaaccataagcttttcctccccacttaaagtgctttacaaccaaaaggccttcttcacacacgcggcatggctggatcaggctttcgcccattgtccaatccaatattccccactgctgcctcccgtaggagtctgggccgtgtctcagtcccagtgtggctgatcatcctctcagaccagctacagatcgtcgccttggtaggcctttaccccaccaaccagctaatccgacttaggctcatctaatagcgagagctaaaagccccctttcacccgtaggtcgtatgcggtattagcttgggtttccccaagttatcccccactactaggcagattcctaagcattactcacccgtccgccactaagtatcagaagcaagcttcctaacttcgttcgacttgcatgtgttaagcctgccgccagcgttcaatctgagccatgatcaaactcttcagtttaatcttttgttgccaatataaaaagacaagcttttttattggactttaattttggctcattcatcgtgtacgttatgtacttactagcaataattgatattttaaaaatatctgctcatcgtgtaaatgaattaactttgagtatttttgccttacttaagataagtaattaagataagtaataagtatcaatgaatgataatttatttaagtatcttgtattgacaaaaatccacacaagttgttctttagtttggattttaaatagttttgaacactgtcatccagttgctcaatgagtggcgtattatatgccaaaattttattaagtcaagcacttttttcaaaaatttaaaatttattttttaagtttttggtgctccagtaaacggtatactaaatactaagtgattgatttagcaatgttttttactgtgctgtactgcttaagtggtgcgtattataggcatgatatcatgacttgtaaagcagttttttaggattgatggtagaaagttggtaagtgattgattttgttgggggtttggtgaaatttttaaataaaaagccatacgctgatgatgcggctttttatggctgatgcaaattagtctttaatacgctttgtacctaccacatcgcaacgatagctggcttctgcatctgggtcaataatgtgcacatatgaatgatgatcattgtcaagttgtaaatagaggccaaagatttgccaatcattatcatcaccaaaaatcattaattcgccaattgattctaccaaattaattggcaagaaacgagttttaccaccaaaattggcttcggcataggtcggtagtgcttgatcactgaagccataattcacttgaaccgtgtcgcctgtggggaaactacctgtggggcaactatacaagtcacttggcgaaccttattggtgagttggatggctcgatgtgcatctagggcatttgcaatagctgtaaaagatagacctagtgccaacacaggtgcgatgatttttagtgctttcatttgtttatttttcctatttcaatctaaaaagtaaaaattatgaacactgatgattaatgcttaaaaattatagcacttcaatagcaaataatataatgttatggtaaagatttgttgctacgataatgagattttatggcaaatacgattgttagaaaatttttgttacatattggtgtgttgattacaattatttgcaatttctatgatattaatgatatttgataaaaaagcaattcatgattaagtggtgcatgccatggcatgacatcataacttaataaagcaggttttagggttgatggaattttagttaataagtaactgattttattagagattagagtttagaatttgatattatttttattgtatcgtttttatttgtgttattatattaggatatctctttttaacttgacattttttatgataatgattatcattatcataaatggttaaatcatttgaagataacaacttagtattttgatatatttattttaatgccagtcaagcaattaggttaatttatgaaatcaatcaaaacttttaccgcctgtcttacgatgtgcttagccttggttgggtgcggtcagcagaccaaagaagacatcaacgcacaggatactcattctccaaaaaaactgtctgttgtcacaacttttactgtcattgctgacattgcccaaaatgttgctggagaggctgccgatgttcaatccattaccaaggcaggtgctgaaattcatgaatatgaacccacgcctcaagatgtggttaaagcccaaaaagcagatttgattttatggaatggacttaatctagagctttggtttgaaaaattttatcatgataccagcaatgtgcctgccgttgttgtgacacagggtatcacaccgattaacatcactgaaggtgcttataaagacatgccaaacccacatgcttggatgtcgccaagtaatgccttgatttatgttgagaatatcaaaaatgcactcattaagcaagacccagccaatcaggaagtttataccaaaaatgctgagcagtacagtgcaaaaattaaagctatggacgctccactgcgtgccaaattatcacaaatccctgaaaatcagcgttggttggtaaccagtgaaggtgcgtttagctacttggccaacgattatggtcttaaagaagcttatttgtggccaattaatgccgaacagcaaggctcgcctcaacaagtcaaatcattgattgatacggtacgcagcaataatattcctgtggtatttagtgaaagtacaatttcagacaaaccagcaaaacaagttgccaaagaaacaggtgccaaatatggcggtgtactttatgttgattcactgtctgaagctggcggtcctgtaccaacttatcttgacttattacaaaccaccgtctcaaccatcgccagcggttttgaaaagtgatggataaaatcaccatcagccttgacgatatttcggttcgatacaataacggacataccgctttgtatgatgtttcgctacatctacaaggcggtacaacctgtgccttggtcggcatcaatggtagtggcaaatccaccttatttaaggtgctgatgggactaattaaaccccaaacaggttatgtcaagctttgtgatttgaccatcgctcaagcacttaagaaaaatttggttgcctatgtgccacaaagcgaagaagttgattggcaatttcctgtatcagttttagatgtcatcatgatggggcgatatggacatatgaattttttacgccgaccaaaaccaaaggattaccaaaagattgatgaagccatgtcacgcgtccaaattaaccaccttgccaatcgacaaattagcgaattatcaggcgggcaaaaaaaacgggtatttttggcaagggctttggcccaagaaagtaaaatccttttattagatgaacctttcacaggcgttgatgtaaaaaccgaaaaagccattatgaatcttttagatgaattgcgtcaagaaggtcatctcattttaatctcaacacataatttagggacagtacctgaattttgtgaccaagttatcatgataaatcgtaccattttagcaatgggaagcaccaaaagtacattcacccaagccaatcttgaaaaagtttttggtggtgttctaaggcagctgcacttggtgggtgaagacttgcacgatgatgatgataaacgcactttgacgattttggcagacgatgaaattcctgctgtcttttatggtcatcatcaaaaccgcagctcttatcatcgcaaaaatgtcaaatccagcgaaaatccccaagctgagcaagaggataagtcatgattgcattactacttgagccttttgcttatgaatatatgctcaaggcaatttttttaagctcattagtaggcggtgtttgtgcctttttatcagcctatctgatgctaaaaggctggtctttaatcggtgatgccttatcacatgctgtggtgcctggtgttgcaattgcctatgcactgggtgcaccttatgcgttgggtgcgtttttttctggcattttagcggccttatctattttatggattaagtctgtgaccaaactgcgtgaagatgctgtcattggatttatttttacgactttttttgccttaggcttatttatcatttctttaaaccccaccgctatcaatgttcaagaaattatttttggcaacatattgggcattgccgatacagatatgtatcaagtgactgttgttatggtcattactttgttgattttattaatattttggaaagatttgctgttggttttttttgatgaaatacaagccaaagcggtgggtttatcaagcaaatattataaattattattttttagcctacttagtgcctgtgtcgtctctgcactacaaaccgttggtgcaatcttggtcattgctatggtaatcacacctggagcaactgcttatcagctcactgataaatttcgtacactgattttaattgctggcgctattggcgtcatcactggcggatttggcgtatacttaagttattttttagatggtgcaactggagggattattgtctgcctacaaacagcactatttatcatcgcttttttgttttcacccaagtacggtaagttaaaacagccaaaatttcagtctccctaagtcctaggtgtgccaaacctttttagtttattacttatgtcaaattctattttatactggttcaccgagccttttagtcatacctttatgcaacatgccctcatctcagcggtggcggtggcggttatttgtgcacttttatcctgctacattgtgttaaagggatggtctttgatgggagatgccatctcgcatgcaatttttccaggggtggtggtcgctttttggctgggcattccgatgacttttggagcatttattgccggagtatgttgtgctggtgccgtaggctatttacaaactcacacccgacttaaagaagatacgctgatgggcgtggtattttcaggtatgtttgcattagggcttgtgatatttcataagattgacagtggtcaacacttgacacatcttttatttggcaaccttttgggcatcagtcgcaccctgatgtaccaaactttaggtgtttcagcaatcatctttttgatactcattttaaaaagacgcgaccttttgttgtattgttttgacagccatcatgcccaagttgcaggtttatcgatacaaaaactacactatggcttgttgattatattgtcagcaaccattgtggttgctatgcaagcggttggggtgattttggtgattgctatgctcatttcacctggcatgactgcttttattttatgcaaacgctttgatacaatgttgctgactgccatcattagctcatgttttacaagtgtattcggggtaattatcagttatcatctagattctgcgacaggtgcgacgattgtactgatgcaagctttggtatttttgggtgcaatgatttatgacaaaatttgcttatggcttttaaacttttattaattatatttttaatatattttaaatatcatatcaagcaatatttgtactacgccaaagctaagtagcaatgttggcatacccagtaccatcagcacgatttgccatgggtcgccaaatatcaaacataccccaaactgagggatcatacagaattcaaatcatacctaaaccaaatctttgtttaagcggtatcaatagtgccaatacgccacagctgataagaaaagtaaatgcccaatattttaccccctctgtactgacgctcctaaacaaacaccgttcaagacccaagtcctgttgtaatttttacaataacgcttcgccaaacccaaataaaccaagcaatatacctatcgcatggcaaagggtttggctttggttgtccaaaaaatgtacgcctccatacagcggtgggtaaaaacatatgagtttatcaagctacttcttggactaggctagaacaaagagcggattttataaaaaatgctttttagccccccccttattatatttgggctgattgaatccagactctggcatacgcttttttacctgcttgaatcaccaccgtttgcccttgttctaaggcaaaactgccatcgaccacttgaccgtccactttaaccgccccacgagatagcatgtctttggcctgagcagagtttttagcaagacccgcttggtttaagacttgggtgataaataatttatcttgaccatttaaagataagcttacctctggcaaatccacaggcaactcaccgtctgccaagcggttgccagctgatttgtgggcattatcagcagattctttgtcatgaaaacgctcaatcagctctagagctaaaatgcgtttgatttcttggggattacggccatttttcatatcatcaagcaaggcgttgacttcgctcattggcttaaagcttaaaagctcaaagtagcgagcgatgagcgtatcaggcatggatagaattttttgatacatgacaccagcagggtcattaatcccaatataattccccaaagatttgctcattttttgtacaccatccaagccttctaagattggcatagtaatacacacttgcggctctttatcatagcgaccttgtagcgttcgccccatcaataaattaaaagtttggtcagttccgccaagctccacatcggcatctaaagcaatgctgtcatagccttgcaccaaggggtataaaaattcatgaatggcgatgggggtctggctgttatagcgttttgaaaaatcatcacgctcaagcatccgtgaaacagtaatttggcttgccagttgtatcatatcccctgcactcattttgccaaaccagtcggaattaaagacaattttggttttgtctttatccaaaattttaaaaacctgtttggcataggtttgggcattggctttcacctcggcttctgtcaatggcggacgggtggcatttctgcctgatgggtcgccaatgcgtgccgtgtaatcaccaatcaaaaacagcacctcatgccccaaatcctgaaaatgacgcaatttatttagtaccacagtatgtccaaggtgtaaatcagcagctgtcgggtccatgccaagcttaatgcgtagcgggcggtttttttctaatttttttatcaaatcttctttggaataaatctcttgcacccctcgcatgataagcgtcaattggtctttgatgggtaaaaaatcactcatggtcatcgcctttatttaacttctaagatcaaaaattgtcttgattataacaaaaatcaccaaaaagtcatcttacaaagtcggatttatcaaaaattcatatcctatacaaaaaaaatttgttatgcttaagttttgtatgatgtaaatgttggcaaattatgacgatatcagcagattttttagaagaaatttttggcgaaaacttagcagacctgaccattatggacgaagcaccttattttattggtatgatgagtggcacaagcttagatggcatggatgcggtattgtgtcggttttttgaaacggatgatgaaacatgctcggttgagattatcgcaagccacagcgtgccatttaccgaggacttacggcaagcgttattatctttaacgacgcctaatggtgtcgctacatttatccaaacttgtgagtttgactttcaaagcgagctggatgtctatggctgggcgagcgtgtattatgcaaccttcgccgctcaagtcgcccttgagctgcttgataaggcaaatatcagccatgatttggtttgtgccattggttgtcatgggcaaactgttcgccatcgccccaattggtcatttagcttgcagttattagacccaaatattttagctgagcatacaggcatcgctgtggtcagtgactttcgccgccgtgatatggcagtcggtgggcaaggtgcaccacttgtgccagcttttcaccaagccatatttggtcatgataagcaggttaagggtgtactgaatttgggcggaattgccaatattactgtattaaatcatgacaaaagtacaccgattggttttgatactggggttgccaatctgctgatggatgcatggaactttctccatacaaatacctgttatgaccaagatggtacttgggctgccagcgggcaagtcattcagccattacttgatattttgcttagccatcctttttttagccaatcaccaccaaaaagcacagggcgtgaagactttaatttgtcatggcttgatgcaatgatcgatcaattaaacagcagtcacccaaatttgtgccatacccctgccgatatacaggctactttgtgcgagctgaccgctgtcagtgccgccaaacaaatccgccattttattaaatcaggcactgtgcttgtctgtggtggtggtgcaaaaaatacccatctgatggcacgcctgcaagcacatctgcccaatttatccatcaagccaaccaatgattggggcattgaggttacttggattgagagtgtcgcatttgcttggcttgcacgccaaaatatcttagggcgtcatggtaatgttcctgccgtcactggtgcaaacaaaacggttgtattggggcaagtatgtttttgattttatcttgataaaaccaaaaacatatccgaaatgaatttaagcagcaggtcagtgcattgattggacgacacggaaatttatggcgtaaaaggcgaaattagcccccatttttgccagtgagtgggatttaaatgctcaaaaaaaattattttgccagtgttgtgtctattatcaaataatgaatattctttaaagcgaatattatttaatatggttaaaaataaataaaaatatgagatattaacattgaatgaccttagtaataaacatgagcattatgaattattaaatttattaggctatggtttagcgaaattcaataatgatttcataaagcaatttaattgccgtacaaaagagcaattttatcagtattttgttgattttggcattgcaaaaaccaagagtgtggtcaaaaatcgccaagatttatttgacccttattttgataatggtagattgggctggtggcagaaaaaggaagtttatgaacaccgaaaattactgattgatggtttgtttggtactgaaaatgtggttaattatgccaatattgttaaattgattttaaaagataattataaaacctctgattttattgttgaaaaaatcagcattgaaccaatcacacaatcaaaatttaaaaaaatgcaagaaactggtttagaggctgaattgtattttatgaataattatcagaatattgaattatttggtaatggggttttacaagatgcaagattatttagcgatggttatgattttcaaattgcaaccaattcaaacaattatttggcagaagtaaaaggcattcgccaaaataagggaaaaatccgtttaacagaaaatgagtatataaaagcctgtgaatataagcatgattatattttaacattggttttaaatttaaatgaagtgccaagatttttagttatagaaaatccagttaatgaattaaattttaaagaagtaatttttcagtcaaagcctgtaaaagagtatcatttggagcgtgatatatgctaaattttcaacaaaaacaggaattattttttaattgtttaaatgagaaaaataattcttatagtgatgatattcgtaaagaaattttattttattttgattttttggaaaatgatttaggttttttgaatagatttagttcagaaattgagattaagaattttacaaatatgcttgtttcaaaaattattatgaatgaatatcaagacggtgttcataatattattgaaaattattgttgttaatggggataaatgtgaaaattcataaaaattttcccaagtcgtgatgaaccttttgatttaatcacgccagatgggcaaattttaaatgccaaagtctgccaagagaattcaaaagccttaatgaccaacccaaattctgcgttggctgattggttattgcgacaattattaaacttaaaaaaggcgagctggcaaccagcgaaagattgcagttgatagattgtgatggtgtgattatcaccaaaattactgataatcaatataaaattgacaaggcagaatttggcagttatgagaattttatcaataatttgtaaaaaaggagcaaatcatacaaacccctacccgtgccaccgacatgcgtggcggtacttccaaaggtaaattttaacctaatcaatttactcaaaccatccaaaaattaccaagcagcaatataaacacagatttatttgagccaacctgatcaaaacaaggaactaaatagatgaaaaagaccatttttaacattgcaaaaatggactgcccgtccgaagagcagctcattcgcatgcgtttaaaagatgtatctgatatttatgaattacagtttgatattgctggacggtgcttaactgtctatcacgataatcaagatacaacgattttacaagtacttgaaccgcttaattttgatagtcatatcatttccaccgaagtgatttttgataagatagtgtttaacaagcctgatgagcgcttagaaaaaagattattatatcaagtactcatgattaactttgtgttttttatcatagagtgttcggttggtatttttgctaattctatggggctgattgctgatagtctagatatgctggcggacagctttgtctatatattggcgctatcagccattggtatgacgctggcgtataaaaaacgtgtggcatttttggcggggataacgcagataatattggcgttatttggggtgatagaagtgattaggcgttttatcggtactgagcagctgcccaattatcaactgatgattggtacggcatttttggcattgattgcaaactggctgtgcttatatctactgagcaaaaatcaaaataaagaagcccatatcaaagccagcatgatttttacatccaatgacattatcatcaatatcggtgtgatagcggcgggagcattgacgttattgactcattctagctatcctgatttaatcattggtatgattgtctttgtcattgtactatttggtgccagaaatattttaaaattggcaaaataattcatatcaccagcaaaggagtttttatgcaaatatcggtcaaagccacctacatacgtggcagtacttccaaagggacatttattttttaaacttcctgtcaatttagcccattaaaggctggtcaaaaaataagccgtgttagcaaaaggcataacacggcttaagttttaaaccataaaaaaatcttaaatgataaatgggcttaaatgacaaactgacccattaaagccatcatgtcatctgtctgcttcaaacttggcaaccgttttggcgatgatgtccacacactcacgcagttgggtttcagtcatcacaagcggtggggcaaatcgaatgatgttgccgtgtgtgggtttggcaagcagtccattttctttgagtgccaaacataagtcccaagccgtactgctgtcttcggtgtcattgatgaccaccgcattgagcaatcccttaccacgcaccaaggttaaaagctcatgcttatccaccaacttttgcatctcttctcgaaagatatgaccaagcttatcagcattatccgctaaattgtcatcacgcaccacctctaaagcggttttggcaaccgctgcccccagcggattgccaccataagttgagccatgctgtcctgggcgaatgacattcatgatgtcatcatctgccatgaccactgatacaggataaacgccaccagagacagctttgcccaaaattaagatgtcaggacgcacattttcatgatcaagggcaagtaatttgcctgtgcgagcaatgcccgtttggatttcatcgcctaaaaacagcacattatgcttatcacaaagggctttggctttggcaagataaccttcagatggcacatacacacccgcctcaccttggattggctcaaccaaaaaccctgccacatctttattatcagttaacacttgttctaaggcttgaagattgtcgtattcaactttaataaaaccttgggtataagggccgaagtttttacgagcattttcatcgttagaaaatgagatgatagtggtggtacgaccgtgaaaattattctcacagacaatgattttggcttggttttcatcaatgccttttttctcgtatgcccattttcgacaaattttaatggcggtttctaccgcttctgcgcccgtgttcatcggcaaaagtttatcatagccaaaatagtcacaggcaaaggcttcaaactcaccaagcttatcactgtgaaatgcccttgatgttaaggtcagcgttttggcttgttcggttaaagtggtgatgattttggggtggcaatgcccttgattgaccgctgaataggcagataaaaaatcataatactgtttgccctcaacatcccaaacatgcaccccctcgccacggcttaataccacaggcaaagggtgatagttgtgagcgccgtattgctcttcacggtcaatataagcttggctgtttgatggttggttggtggtgttcatagtgaagtccttaaaaaaaatatgtccatgaatggtttgaattattgggttgtgtcaggtctgactagggtggatttaccaaacaaggattcaataaaatccaccatgatgaccgctgtgcggttgcgttcatcaagggttgggtttagctccatgatgtccaaagatgccattaagccagtatcggcaatcatctccatacacaatgacgcttcacgataggtaggcccgcccatcaccgttgtgccaaccgctggggcgatgcttgggtcaagaaaatccacatcaaaactgatgtgtaagtgcgtgtcattatccaagtcttttaacgcttgttccatggtatgacgcatgccattttcatcaatataacgcatgtcaaagacagtgacgcctttttcgttgatgaagtatttttctttagcgtccacactgcggataccgatttgatacacatcttttgggctaatcgctcctctgacaccgccaatggtggttaactcatcaggaccaaaaccacaagcacaagccacaggcatgccatgaatgttgcctgatggggtcatttcgctggtattaaaatcagcatgagcatcaagccaaaggatacgcaactttttgccttgctcacggcaatggcgtgccacagcggtcaatgatgccaaacctaaacaatggtcgccccccatcaaaatgggaaagttgccatttttcagctcatcatacacagcatcgtgtgccattttgttccatgcaaccacttcatcaaaatgacggtagccgttcacagggggctgattggggttggctgggccttgcaaattaccacggtcaatgacagtaaaaccatattgttcaatggctttatcaatgtcagcaatgcgtaaggcatcaggccctaagttcacgcctcgcacacctgcacccacatcggttggggcacctattaacgcaacggtaggtttgtttgtcatgtgtcatgtgtccttgattgtctgttttttattgatattattcggttaacctaaaaaatatcataaataataattgatgatataaagtaaatagataatgataaaatgcccatcttgctaagtttaggcataccaaagctgatatgacccatggcaaatggtaatacaaatatcaaaacttaattatgactacaacctaaagaaaataccacactacaagcagaaaatccacaaaaaaaaaatctgatgatatgagatgtaccagcttttttcaatgcaatcaatacatgatcatatgtccaaatctggacaccaaaattcatacaattatctaagttttatcaggcaataaaaagctaaggacattatctttagatgataacaacctttacatctatgtcttttaccataagcaaatcctactttgacaagatgagtagattgatatttaaggcaatgggtactaatttggtttagttgttattctgggtggtttggatgagagtatagtttggttataatacgatttttaaaataggcaaaatcattcattgtcgccagcaaaggcgtttttatgcaaatccccatccatgccatttatatacagttggctgacgccagtcgtatgcctgagatggcatttgtaaggtgcgaatttggcaataaacattgcaaaaccatcatcgcccatgtgcttatcacagatgggcaagtacaagaaacgggggattttgagcgtgatggcgtaacttttccaacgacggaagtttggattgattttatcaaccctgtgaacagtgatggcgatatgttcccaacaggcaagttgatagacatattgacagtgccaaatgtggatgaatttgaagcgaacttgattaacgcaggcatgcccaccatctttatttgtgccagtgatctttaaaatacttaaatgaagttttattcaccctaattcttattttcttctaattgactgattgaggcatcatcaagcttcacatccgctttactgactggggtggtttcaatcacttgctctggtacaaatcgcacttgcaatttaattggcgagcgtttgggataacgcttggttgttatggtttgaattttttgttccatctgccaaatatcctgatgactcggtgcaatcagcccttgcaataatactcgaatcatatagctatcagcagaagctttattgttttgacctttttccaccacaccaaaatcactactaacaacatagctaggctggtattggatttgctgctgaacaacctcaatgactgccttttcgtagcttttttgacgaatgcgttgctgaaaatcaagcgtcaaatacacacttagcccaatcaataaaatcaaagtgaccatattacggcgaataaataaccagttttgttgccatcgtgaatcttttacggtttcatcttcacttttatcaatatccaatcggcgaaaccccgccgcccaaagcactaaagcattggtaaactgaatcgccaaaatattggtcaaagttagtatcaatgcccctaatgccaattgataatgtcccgtggcaagcaatattccgctggcagtcagcggagggacaagtgctgttgcgactgccacgccaaccacggcaaccgataaattacgagaaatcaacgcatacgcccctgccacaccacctgccaatgccacaaaaacatccatcgtattaggggcagttcgggcaataatctcttggcttgcagcttgatcaggatataaaaagccaagcagcacaccaatagcataaatcaacgcaccgccagacaataaggttaacagtgattttttaagtaaagccaagcgagcatcaataatcgccaaagcaatgccgctgatcgggcctatcagcatcgcaattaacatcgcaccaatcaccactgcaggtgaatttgctaacagcccaaaccctgcaatcacagccgataaaccattcatcaaataaaaatggcgtgtcggcagtgctccagattcaatatcaatccgaatttggcgatagtcgatggctgtttcgctgtttttcttggcaagatattgtttaaatgcttcgtattgttgctcttgctgttcttgttgttcttttagctgtttttctactgccgcatgaatatcattatccaaactttctgcaatcttagctgcagatgcatcggctgactgtgctaaagcttgagcaacatgagatttcgtatcatcggttttggcaggatgcgacgggttttgagccaacttgtgaactttgctttgatttgggcgtgaggtatgggcaaaatcattagggctaatctttttggtgattgggtttatttttgagtgtgtctgattggcatcatcacctttgggcagattatcatcagtattatcatcttgcttggcatcatcatttgcattcttgcttagctgttcattgaccgcctttgagacgctttcgatggtttcttcactaaatccttgctcaatcaaattttcaatatcttcttcggtaagcgtaataccatcatcgccgtccttagtttcattattggactgtttttgttgctcttgtacctgcttttttgccagaagctgggcgtacatggcaggctgagttagcagatgattggtgagtttttcgattggtggctgataaaaaatcaataacgacaaatcaatgttaacatgcggtgatacagtgggctttggtgttgtcatgataaaaaatctgattttaaagatatgctaagataagttggtataagtcatgagtattacttactattataaaccattataatcaagcatggctaaaaattcggtgaaacaatcaccccaaaccatcaatcgcataagcggcggataacaccagtagcgttttatgattaaaatatgctacaatctaccttatttgtgaatgccattttatccatcaactcacgagtacaccatgcaccaaattaaccctgaactgctgaccaaatccaaacagtggcggcatgatattcaattttctcaagaggtgctgggcaaaccctttaactttaccagtacttgggggatttttagccctgaaaaattagatgatggcagcttgatgttattagattatattgattttcaaacacaagataactccattgaccttggctgtggctatggcgtacttggcatgacggcggcgcgtgaatgcccaaagggtcatcatttattgattgataaagattttgttgccatagaatacgccaaacttaattgtaaaaataatgggcttggcaatgccgaggtgatgctttctaatggtttttatcatgtggataaatctcgccaatttagtctagtcatgagtaatttgccagccaaagccagcaaagaacagcactatttatacttacttgatgcttataatgccatgacaagtggcggtagattttatgttgtaaccatcaatggactgcgtgattttatgaagcgttcttttaccgaggtttttggcaatgccgataaaatcaagcaaggcaaaacctacactgtgaccatggcaatcaaagaatcatgacagttgaccatatcaaccgccaacattaaggcgaatgcagtcaggtttggtatcggttactgttggcaaatgggttcggtaatcttaatttgtcaatttttaaagcactgtgtggatttaatctcacggcttaaaaagggtacacattcataccatttatcgcagtttttgccacattcacggcgtatataaaaatcctcaaccatgcgtgcctgctgctcaataccatatcttaaaaatgctttcccctgtatccaccgataccgatagcggcggctcaaaatcgcacgccaaaacacccgaatatcttgttgtacctgccacacatgcaccagctcatgaatcagccaagcacgcttcatcaagtgttgagatgaaaaatcctcacaaaaatctttgggatgaaaatacacatgaccattgggtgagacggcatagccttggataacccaccatgcagtctttagacgaatatcgtctaatttaagtgcatcgccaaatacgctgatcgccatttgccgctcgccgaaactcagagggcgagatttggcagaataacaataagggcagctcatcttcataaatgaccatcaaaatgggattggttttgtgctaaaatagcataaaaccaatccaaatccaacaaacccagcccaataaagatacttttatgaaacctcttgccgaacgcatgcgtccaaccacgcttgatgctgtcattggtcaaacccacttacttagtgagggagcgccgatttttaatatcgtacgccaagggtttttgccgtctttgattttgcatggatcggcagggattggtaaaacgacacttgccatgctactggctgatgctgttggtcgtccgtttcgccccttatcagcagtcagtagtggcgtcaaagaactcagagaagtgctcagatctgacgatgggctatttcatgagccacctgtcgtctttgtcgatgagattcatcgatttaataaagctcagcaagatgctttgttacaagcggttgagacaggtgaaattactttgattggtgcgaccaccgaaaacccttcttttagcgtcaataatgctctactgtcacgctgtcaggtatataaacttgaacccttaagtgatgatgagatttatgcactcattgtgcgtgcaatacgacaagataccttactaaaaaccaaagacattcaaattaatgacttagcggcactcattgatctatctcaaggcgacggcaggcgtgcactgaatttacttgaacttgtggcagcagcacctgagccaattatcatcgataatgcttctgttgctgctgtggcaggtcagcccttggtacgctatgataaatcaggtgatgggcattatgaccttatctccgctatgatcaaatccgtgcgtggctcggatgcagatgcggcgatatactggatggctcggatattggcggcaggtgaggatcctgcatttgtcgcaaggcggctggtcattttagccagcgaggatatcgggcttgccaaccccaatgccctactactggcagatgctggactacgctcagttcagtccattggcatgcccgaggcacgcattattttggggcaagtgattatttatttggcaaatagtcctaaatcaaattcaagctacaacgccatcaatcgtgccttaaagcttgccgaaaccgatcaatcgcccgtaccactacatttacgcaatggtgtcaccaagcttatgcaagcagaaggctatggcatgggctatatctatccgcacgattatcccaatcattatcacccacagcagtacctacctgatgcactgataggtacacggttttatgaatttgctgataaccaaaaagagcaagccaattttgcctttatcaattgtctaaaaacctaaaaaccaaataccatccatgctatctgaaacactgaatgcctttataaaattaaatccgtccccatgttgatggcaaatatgctaagataacccaaatcccaataagagaacattatggctttaaatactattcctgaaatcatcgaagacatcaaagcaggaaaaatggtcatcttaatggatgacgaagaccgtgaaaatgaaggcgatcttatcatggcggcaaatcatatcacgcctgaggcgatcaactttatgatcacgcacgcacgaggtttggtgtgcctaaccttaaccgaagcacgctgtcagcagcttgatttgcctttgatgagcgataaaaatggcgcaaaattcagcaccaattttaccctatccatcgaagctgccgaaggggttacgacaggtatctcggcatctgatcgtgcacgtactgtccaagctgccatcgcagctaacgccaagccaaccgacatcgtccaaccaggtcatattttccccatcatggcaaaaaaaggtggtgtgctgcaccgtgcaggtcataccgaagcaggctgtgatttggcacgcttagcaggacttgagcctgcctcggtgattgttgaaatcatcaaacctgatggcgaaatggcacgccgtgatgatttggaagtatttgccaaagaacatgggctaaaaattggtaccatcgctgatttaattcaatatcgtatggcaaccgaacaaaccgtcagcgaagttgagcattttgctatccaaactgagcatggggattttaccgcatatcgttttagtgagtttggctcagatgatacgcatttggcatttgtcaaaggtaagccaactggtggcgtcagcacagtgcgtgtacatagtttttcgcccatgaaagacttatttgggattcataccagcggtagccgctggaatatccaaaatgcactggcaaaaatcgccaccgctgagcatggtgtgctggtgtggattggtcatgatgatacacttaatcttggtgatggttttgaggcactaaaggataagcagtcggtaacctcggtgaatcgccgtgcaccttatcagaccattggcgttggtgcacagattcttaaacacttaggcgttaaggacatgcgtttattatcaagccctatcaaattcaacgccctatcaggttttgatttgaatgtggtcgaaacgatagataaataatctgcctttatcaaacagccctaagatacagggctgttttttgataagcttgagtaagaatattcacacatgctatacctcatttacaggattataaaccatcttggtagtcgcagtcgctataataattatcagataagttattattacaaataaggaaatggcaatgttttcaatgatttgggcattaattgtaggttttgttgtcgggttattggcacgagcacttaagcctggtgtggatggcatgggctggatactgaccatgattttgggtattgctggtgcttatgtgggtgcatttattgccgactttgttggcgtcaacgcccaatcaggttttagttatttaattttttctgtgattggtgcaatcattttattgtttatttatgaaattttggcaggtaaacgccatttaaaataaccctaactgtttggttaaaaagtatcttattagtgcttttttatttttaaaccatctaataatgtgtttatcgtaagatatgacccgccaataaatccttgatacagcttggttgcgcaaagcccaaaccatcggtatctaagtaagcaatttgattaccaaaatatcccattgcttgtgttaaatttttagcaggtgtactctttgatggattgcaactggtcgataccaaaaatccataagggttggtcggtgagattaaggcgtgacataaatcttttaataaaggatgtgtggtgatacgcaccgccaaggtatcatgtgaaccaatcagcaccgatggcaataccgatgactgaataggcatcagccatgttaaggcgcgtgaatgctcatgcgtaaactcatccgaaaaattttgcatataatcaagtaaagatgtttcatgtgaaacatcaattaacgattttaagcgttcagctgcatctgtcagtacaatcaaacccttaccaatatcacgatgtttaagattgataatttgattaatagcatcagtgttaaatgcatcacaaccaagcccccaaacgctttcgctagggtatgccaatacaccacctgcctgcaaataattagcaaccaagtccagctcatcagctccaaaaatttgtttagagcctgccatagcgtccccccacctgctcaatcaaacccaatatctcaagctccatcagttctgctaagaggctgccggtatctttttgactactaaaaacaagctgatccaaatcacaaggctcattcatcaaagcgtacaaatccgccaaatgctctggcacacaagtactgcggcttgcaggttgtaagtgatgagcggctgtcttagggtttggacttaccaaggtatttgtgtcaggtgcttgagatgggtgagtgttcaacttacttgattcttcactaaatattgacataccttgactaaagctttttggtaatgcgttaaaaaactcttggtcatgctgacttaagtcttccaaaatttgatcaggatgatatatgagtgttgccccttcacgaatcaggtgcagacaaccttcagcgttaggattgtgaatatggcttggtatggcaaaaacctgtttgccttgctctgctgagagacgagctgtaatcaaagagccactttgaagtgccgcttccgtaacaaccgtggcaagtgacagccctgccaccaaacgattacggcggggaaaagtatgcttactggctggtgtagcaggcaatagctcactaatcaaacagccaccatctttgatgatttgagcaaaaagtgcattatgattacgcggatagcacacattgatgcccgttcccataacgccaacagtacgcccagataaaacagataattgagaaagagcacccagatgcgcttgtttatccacaccttgcgccaaaccactggtgacggtatatcctgattggacaagatattgtgccaaatcaaaagtgattttttgggcaatctcagtcggcgatcgactaccaacaatggcaatctgacggtctttaaggcgtatcaaattaccacgataaaatagtactggcggtgggtcataaatactttttagtgtttctggataatcttcatcactgacatatacaatgccatacatcttaagctctacatcatggcgaaccttatcaagaaaagccaaaacatcgttgacatcctgccaacgcttaatgtgtgccgcatggatgccaagcaatttccaaatagactgattttggcttaatgcagatgctgcatcgccacaatgattgacgagcttataatatgaaatcaatgaagtattggttatgtaccaaagtgcaagcattgattgctcaggtgttagcgatgaatagctcattaatcagcacgcagtaatatattgctcaatcaatgctgctaccgccttagtatcattaggcaccacagtaacatattgaggcttatcttctaagccttgggtatgctcaggacgcagcaaggtcatctcacctactgcctctacgatggtttcttggaatttggctggtaatgctgtttcggcaaccaaaatcatctcatctgctttttgtagctcaatcgcaacttttacaccatcagcagtgtgtggatcgatcaatcgctgcgtatcatcataaacttttttgatggttgccaagcggtcttgatgcgtagatttaccagctataaatccaaatttttcactcaccagttttaaattatccgacaaatcaaaacccttaccacttttaacatctccaaacagcttagcgacttgcacactgtccttatcaagcaataaaaacacaaaacgctcaaagtttgaggcctttgaaatatccattgatgggctggaagttacataagtttcgaccgaagtgcgtggcgtgtatttgcctgtattaaaaaactcatttaaaacatcattttcattcgttgccacgatcaatcgatcaatcggtaagcccatctggcgtgcgatgtggccagcacaaatattgccaaaattcccagaaggcacacaaaaactgatcttttgggcattgtcggtggttgcaccaaaataacctttaaaatagtatacaatttgtgccaaaatacggccccaattgattgaattaaccgtacctaagctatattttgccttaaattttgcatcttcttggagggctttaacgatatcttgacaatcatcaaacattccctctacggcgatattgtgaatattggcatcatccaagctatacatctgtgcccgctgaaaagcactcatcttaccttcaggtgacatcatgaaaacctcgatattatctttaccacgcagtgcatattcagccgcactgcccgtatcgccagatgtcgcaccaatgacagttaaacgctcgtttttttgttttagtacatattcaaacgcattacccaaaaactgcatggcaatgtctttaaaagcaagcgttggaccatttgatagctcaagcagtgccaaccgatcataaagacgagtcacaggcgtaatatcctcactgccaaaagctgcttttgtataagttttattgatgatattttttaaatcatctgcaggaatatctgtcacaaacagcgacataatctcaaatgcaagctcgctataactaagattacgccatttttgtaaagttgcttcatcaatacttggataagtttcaggcagcatcagaccgccatcaggtgcaagccccatcaaaagcacatcactaaactgcatcggctgagtcttgccacgggtactgatatattgcataaaaactccaactgtcttaatatcttaactatgaattgagctaattttagcataaattttcagcgattggcgaactatcaatcggtcgatgattatacctgtttcacccatcgataataccaatccattaccgctaaatttatacactatcaatatcgccatattttaatttgattggcctaagagttatcttaggaagttactgggttattttaagatacatggtgtcattttagcacccaaactcaatcaatcatcaaaatcctttatcgtcatattcaccaaaaacagcaaaatcaccattgattaaacgattgttattttgctgtttttgtcagcaaagcataataaaaaccgtcgccacccttggtatctaaaggtaagcattgataacctacctgctgcttgatttgatgtggtaagcttaaatcaaaaggtatggcgtttgcatcgtcattagctctcaaaaaatcaatgatttgtcgctcattttcagccttcaagatagagcaagtcacatacaaaagcacgccaccaacttttaaccgtgaccatagattgtccagtatgcttctttgcaaattaacggtagttgcaatatcctgttcttgtctaagcagcccaatatctggatggcgacgcaaaacacctgtggcagtacaaggtgcatcaagcaaaatcacatcaaagcattgatccgatcgccaagatgtgccatcagcatgaaccacagaaatatctttcgtatcaagcttaaggcgactgatgttttcgtgtacccgttttaatcgaatacgatcactatcaatagcagtcaaatgtttcatgtgaaacatctcaagtaaatgcgtggttttaccgcctggggcacaacacatatctagcaccgattgatgactgccttgtgattgcaaagtaggtgccaataaaaaccctgccaactgtgcatgtgcatcttggacggacacccatccttcatcaaaataaggcaattcaccaattcttacaccaccatctagcctgacggcttgtgcctgattatatccaagcgataccaaactatgctgtatatgatgctcatctaaaatctggcaataagatacgttgtctgaaaacttcgtattaactctcaaaaaaatcggtgcagcaaatcttagtgtacaacccagctcatcataatactcaccccaatcttgtttgagctgcttagccagccaatttggtaagctgtggtttttattgactttcttggtaaattttgtttttgacttttgagtttttcgaagaattgcattcacaagccctgtgccatattctttaccaagctgttttaaggcttccaccgtgtcattaatcgcagcatactctggtatattcatatagataagttgatacaagccgatattaatagcggcctgcaccccttgatctgtcacaggattttcaatcaagctctcagaaattcgagataatgcccaccactgccgcaaagtacccagcagtagttcatgtacaaaccctcggctactcatctccgttgattctaataaaggatcaagtagctctgacagcgatttaccatttaaaatttcttcaataactaagataacttttgcacgagatgaaagctgatgattgtgtagtttttttatattatttttcatgagtttttatctcaaaatagtcactatcacaaagtttattggtttggcaaatctgttcagcagtcagtggcttaccgcctggccattgtatacttgtaatattaatcaagtgctgtataccatttgtatcagccccacatgagaccaaaatggcatttttacccacaccaacgatctgaccagctggaattgatgtggtttgatcgaatttgatcggcaatgcacttaaaaccttgatacgctccgatttatgataagtgtgggcattcaatgcacggatttgacgctggattgtcaaagcatcttgattccaatctatcaacccttcttgagtatggattttttcggcataatttgccaagctatcatcttgaaccttggccaatgattgaaaatgcaataaattttgtagcaccgtggtgatcgcatgagccccaatcactgccagcttatcatgtagcgtctgcgtggtatcagtatccaaaataggacatgatacccgatatagcatgtcgcccgtatccaagcctgttgccatttgcataattgtaatgccagtttcttgatcgcctgccataatggcacgctgaatgggtgcggcaccacgccatcttggtaatagtgatgcatgaatatttaagcacccaaattttggtatttttaagacgcccaagggtaaaatcagtccataggctgcgacaatcattatatcaggctgataattcgccaaagtttcacgtgaaacagcaccactgacaccctgctcaggttggtactttaggctaaaacttatcggctgctcaacaggtatattgtacacctgtgccacttgcttaatggctgaagcggttaatttttgaccccgcccagatttacgatctggctgcgtataaactgcgacaatttgtatgtttaaaacatcttgcagatcaataagatgctttaggctgactgcagcaaattcgggcgtccctgcaaatatgatacgtatttttgattgagtaaggtggttcataaaattcatttcttaatatttattaattaatttaagtctattatctataattaatattttatattaataaaattatgatattaataatattaaataatataaatatttttaattaataaaaatttaattattaaaggtaaaatcctgcctgattgagcaactcttcagaaatgctactggtaggcttttgtacttgatttgaagcaaataacaatctttcaagatatcgagaaatcaaatctacctcaatattgacaagcccacccaccgaccaatgccgatcgatattagtacatttggccgtatgtgggatgatattaaggcatacaatgttttgttcaggcttaatggcattggttgtcagactaatgccatcaacagtgatcgaccctttatcagcagcgtaacgcataagctcacttggaatttcaatttcaatataaatcgaacgggcgtcttttgagatatgacgaatcacgcccacaccatccacatgtcctgcgacaatatgccccccaaaacgcatagttggtcgcatggctttttcaagattgactgtatcgccagtacgccaattctttaaagccgtcttgctcagtgtttcacgtgatacatccaccgcataagttttatcaccaatatccaccacggtcagacaaatgccatttgatgcaatcgaatcaccaagatgcacatcattaaaatccatgtctggcgcatggattaccaactgaacatcgccgccaatctgattgatggatttgagtctgcctgtggtttcaataattcctgtaaacataatattttctcatcaaattatggaaaacttttttataatgacattaaaaacaaaagtacaatcacactattaagttttccacagactaatattcatcattagattagatattaatacttttaaaaatcaaatagttaataaaaatttagattatagttagtgattaaccatcttatttatccacaggcttataacatcaattttcttaataaaaaatcataaaataatcattaaactaggctgtggctaagcaaatttaattaagaaatttgctaaaataaattaagttaaactgcgataaattagccgaatatcattgccgatgatatcagcagaatgtagcccaaatcgatactgctgcaccaattgatcaagctgacatgcaaacatcggacgggcatcttgacccaaaatacacggcgcttggtatacaatcagctcatcaaccaagccttctgtaataaaggcgccagacagctcactacctgcttctatcaatacatcatagcaggcatattgtgataccaaagtttttagtagactcattaaatcattacgccaaatcaaggtattatcgtgatttaagacttggtaatcatccaaatctgataatctatttctacgatcgacaatgactaccttgggcttgggtatcatatgtagatctacgccaagctgtttgctacgcactgtcaacgcaggattatccgctatgatagtgcctgaccctgtgacaatcgcagcacttttggcacgcagtcgctgcacatcttctcgtgcctctatacctgtgatccatttggattcgcccgatgccgtcgctgtacgcccatccaaactgctggcagttttcagcctaacataaggcaagcctgtcctcatcgccttcaaaaaacccaaatttaacgcagctgcctgctgatcgcacacccccaccaagacctcaattcctgcattttgaagttttttgataccattaccagcaactttgggattagggtctaagcttgcaacgacaactcgcctaagatttgcagcaatgagcgcatcagcacaaggcggtgtacggcccgtatggctacatggctcaagtgtcacataagcggttgcacctttggtatcaaaaccctgtgctttggcatcagccaaggcaaaaatctcagcatgtggctgcccagccttaggatgataaccctgaccgatgaccagactatctttgaccaatacacagccaacagcagggttgggtcttgtggtataaatgcccttttttgccgccgcaatggcaagctgcatataataaatatcttgctgtatcaatcgtttgtcattcatgaagattcaccacgcttgggtaaattgatcttgtcaagctcagcttgaaactgaccaatgtcctgaaaatcacggtaaacactggcaaagcgtacataagcaacatcatcaagtatctttaattcattcatcacaatttcgcctaaaatcttacttgatacttctcgctcacctgtttttctaagttcatgctctatgcggctgatacatgcttcgatttcatcaacactgatgggacgcttttgtagaggtagtgaaattgagcgtctgagttttgattgatcataaggctcaatacggctattggttttgatgattcgtggcatcaaaatttcacaaatttcaaaagttgtaaaccgctctccgcacgctaaacattgtcggcgtcggcgtacttgtgcaccttcggcagccaacctagaatcggtcaccttggtatctgctttattgcaaaatgggcaatgcatcaccactcctaaattttttattattaattaaaaataattaaatttaattttttataaaaatattaaccaatgaaattgttaagatttttttggtaataaagtgctatttaccaatacaaaaacttgaaaaaatcttacccagcagctcatctgcactcatctgacctgtaatctcgcccaatgcttgctgagactgtcttagactttctgctaccaattcaccagcatgataaatggtaagctgctcgtacgcttcgatggcataccctttggcacgatttaaggcatcaagatggcgagtgcgtgcaatcaaactattttcaggaggatgaaaacccaccttttgggttaatatttcaatcaattcatcaagcccttcacctgtttcacatgaaacataaacaagtttggggactgatttggtttcacatgaaacctgtaaaactggttttgagaccaataaatcacttttgtttgcaaccaaaatcaatttttggcgaataatatcaccaacatcctcagtcacaccctcacaaaacagctgatcggctaatgctaacggatcagtttctgttgtaagatcataaaccatcatcaacacatctgcttgacggatcgcatcaaatgctcgcttgataccaattttttcgacatgatcatcagtttttctaagacctgctgtatcagttaaatgtacagttaacccatttaaaatcaaagtttcttccaaagtgtcacgcgtggtgcctgcaatctctgttacaatggcacgctcagtacccgataagcgattaagcagactggatttacctgcattgggcttacctgccagcaccacatgcacaccatcacgcaacagctgaccttgttttgctgtcgctaagatacgatcaatacctgacaaaatctcagttaatttattttcaatgataccatcagacaaaaaatcaacatcttcttcctcaggaaaatcgatcgaagcttccacatacaagcgaagatgaacgagcttatctaataactcattgattttttgggaaaattcaccagtcaaagaacgaatagcgctggtagcctgagcgacagaagtggctgaaatggcatcactgatggcttcagcctgcaccaagtcaattttatcattttcaaaagctcggtagctaaattcccctgctgctgcttggcgtgcaccaagctcaaacacccgagccaacagcatgttttgtagtaccatgccgccatgaccttgtagctccaccacatcttctccagtgaatgaatgtggtgccttaaaataaattatcacaccctcatcaatcacaccctcttgaccataaaaaccaccaaaatatgccattctgggtattaaatttgaccgcctcgtcattaggcaaccgatgcgataagcgtctttacctgataatcggatgataccgacaccgccttgaccgatggggctggcgatggcggcgatggtcggtaattgttggatactggttgtcataaattgataaggttttctgctaagttaaccttttattctatcattattacataaaaaattgctagcattggttattgactgacaaacatatcaagccaaaggcgtatcaatccagccataaaaaaatcccacaaattgagtatttgtgggatttttgaggattgcattaagcttgctttgctttcatttggcgttccacacgcttattaacaagatgttgatgagtcatactaaataagttattcactgtccagtacaataccagacctgctgggaaccatagcatgaacaccacaaaaatcatgggcaaaattttcatcatttttgcttgcattgggtcggtaggctgtggattgagcatttgctggacaaacatggttatacccataaaaatcggtaaaataaaccaaggatccattgctgataaatcggcaatccaaccaatccatggtgcatgacgcagttccaccgactcaaccagcatccagtacaaccccaaaaaaatcggcatctgaatcaaaatcggcaaacaacccgccattggattgactttttcatcacggtataactgcatcatctcttgactcatcgccatgcgatcatcaccgtgcttatctttgagcgcttgcaattttggggcgatggcacgcatttttgccatagacatatagcttttatttgatagccaaaataaagcgactttgataattaaagtcagtacaatgattgaccagccccaattgccaatcactttattaatgttatccaaaatagcgaacagcacttttgagattggccataacaatccataatccaccgtttgatttaagccttcagccaccgatgccatttctgactgaacttttggacctgcatacagcgtactgttaagggtgatttgcttgcctgacgccacattaatcacggggctattataaccaatataaaaatccttgcctgtcgtacgagcaaaaaagtcagcttcaaaactgtttgatggcgtccaagccgatacaaaataatgctggacaattgccacccagccgtctttactgctaatattgatattatcgtcaaaattagaaaatttcagtttattataaggatcacttggcacaccccaagcgccacctaagtaagttgacatgccaagcatgcctttatcctctaggccaggatccttactgctatcacgcttaagctgagcatacatttgcccttgccatggttgattggaattattattaatattataactcagattaattgggtatttgcctgcattaaaggtataggtcttggtgatcgtcaagccatctttgtgatatgtcaaagggacttgtagcgaccctgcacttggattaagcacatagctgctacgcgggctgtggtaaaccgcacggccttcagctgtgtcaatgccatctcgtccaatcaatccagattgtgcaacataggtgcgtaaatcggtttctaaaagtacaaatggctcagtactatctttggtggcattgtgctgttttaaagcagcataaacaatatcgccaccaacaggattgatcttaatttcataacggtcagtgctgacagtgatcaaatcggtatcagccaaatcagctaccgatcctgctgtcaagcttggaatatcacccacaacctgtgttgttggcacatcagcatgagtggtttgggttgccacaggctgcgtaactacaggttttcttgcatagtcatcacgccatgccaaaatcagcaaatatgctgtaattagcatcgctataatgattaaaattcttagaattttttgcatagattcaaatccattatcaataaacaacacaggctattagcctaaatcaaattttaaatcttttattgtactaaaaatacccataaaatcctagaaaatattgcttaagttaccaataaatcatggttggccagtgatttttaaggttttaccaaacaaatcataatgctaagttgttttgattaaatgatttagccgtgctgcataacttaatgtgtctttgaatccataagaaaaataaagatggcttggttgatagtgatagcgagctaaaggcagtggaacaaaatcaataccacagccgccccaagggtgacagcggccgattcgccaaatactgagcctaagtcctttgatagctccatgccaaataatcgcttggcggctataagctgagcaagttgggtaataacgacatcttggcgtcatcatcggactgatccagcggcgataaatctcaatcaagattagtagaatattttttaacataactaaatatttaaaaattaaacactcagttcatcagaatataatttattaattttattaaataattctgttacttcggtcgcgatgtcaaattctctaggatagcctgccttgacaataacaaccacatcaatcgccacccaagaagcttggcgatggcgaaaattttcacggcacagtcgtttaagttgattacgatccaccgctttttttagcttttttttggtgattgccaaacccaatcttgccgacaaaccctgaccctgtccaataaatgccaacaaatgcagggtatgaacctttttaacgggtgaatcaaataccgccttaaagtcggcaggtatgagtaggcgatggtatttttggaagtttttagcttttggcaaagaagtcgctaaattttgagatgtgtcaatcagaacagatgtcataatggcaggttttgtacaaagaggtatgattttaacataattaggtcacagcatcataatttatggcataaaaaagcaccgtgtgatcggtgcttttaatttgaccagatattacacagtcaaacgatgacgacctttagcacggcgacgtgccaaaacttgacggccttttttggttgccatgcgagcacggaaaccatgagtgcgtttacgctttaaaacgcttggttgaaatgtacgcttcataaatcacctttaaagatgtcagcactaacggtaccaaaagttgtcaaaagtgaaactgatgaacaactcaaattacagttaactagttaatgtttctcactttagacgagtgaaaatcttgataatactatcaaatattttttgatttgtcaattaattaccaagttaaatttaaattttttgtcataaacgctcattttttattttataaaaataaagttttttggctaataagtgatgacatttggctagtttttaaggccattgttaaaagttatccacagaatttaatccgccttattatttaatcttaaacttaaatataataataataaagcaaaaaaatcttgtggataaccgtaatattattatatttttcataaagttatcttgtggaaatcaatgtttataaaatgtgcataaattgtggaaaacttagaattttgagttatccacaatattattcatcaagttatccacaaaataaagcttgtaatttaataaaattatggtactatttcaccccaccgattgagcatgatttagtcatgcatagtataaaatcactttgaaccgttttttaattgggataagtcatgagcctgtttgaagatttgcccgtgcaagatagcatctcacccaatcatcttggtgagcgtgtgtggcaattgtgcctacctgatttacaatttgctatggcggataaagactatcgccaatggatcgcaccccttaaagctgaagtgaacgataccgagcttttgttacttgcacctaatatgatgtgggttaggcatgttaaagacaattatctaagccaaatcaccgatcttgcctatcagcatggtaaaggagtgatcaagtcggttcgtattgagatggtggcgagtaccatcccaaatgaccctgcgaccaaaaaagccaaaactaataaaaagaccagcaaaaaaacgggtgtcgttgaagggttgcccattgatcctgggtttacctttgatgtatttatcaaaggtaagtccaatgcttctgcttataatgcttgcaatgagctttctagaaaagaaagtaagcataactatggccctatatttatatacggctcatcaggtttgggcaagacgcatttgatgcatgccatggcgcatcgctatcaaaaatacggtaagcaatttttttattttaccaaagatcatttttataaaatcacgctagaggcatttcgtaccaatgacattgtacagatggaaaaagaaatttgccaagcggatttgttgattattgatgatgtgcatatggtcagtggctcaaaagcacccaaagtaactgaaatcttgatgaagctttttgatgcattctcagcaggcaacacccaaaagcaggtggtgcttgcctcagaccgtcccccttcacagatgaccagttttggtgagcgttacatttctcgtttatcaagctgtttgcagttgtcgattgagccgccagatatggaaatgcgtatccaaattttagaaaaaaaagcgcagatgctcaatctgttactacccagagaatgtgcgttatatatggcacaaaatctaccgcctgatgtgcgtggtttagaaggggcgttaaaacgcgtacagctgtccgccaccattttgcgtaatgagccggtgagcttaccacttgtcaaagacgccattaaagatcaggttcaagcacgcgctcgggcattgaacgccgaaaatattcgtgatttggtggctgaatattatgaaatttccccaaaggatttgatgagtaaaaagcgtgcacgctacatcgccagacccagacaaatggcaatggcactcattcgtgaactgacgcgtgatagttttcctgaaattgggcaagtttttggtggtcgtgatcacaccacagttatgcatgcgtgtgaaaagatcgaagagctgcgtacccaagatgccaaaattcaaaaggattatcattctttaaagatgatgttagaatatgtctagtattgccccagcaaccaacaaatttagtgagcttttatgaaattatctatcaatcgtgacttattactcaaagccatcaatttggtggtaaaggcagcagataaacgccatcgttttgccattttagcgaatattaaattggtgcttgaagaaggttttttgacattgacagcatcggatttggagcttgagctgacgacacgatttgctttacccaaagatggctgtattcaggcaggtagcacaaccttgccagctgagatgttttttagtgtgtgtaaatcactgccagaagaggtggtggtgattgacgcccccgaagataccacgcactgcattattaccagtggtacaggcaggtatacattaagctgtttgcctgcagatgattttccaactatcggcacagcgacacctttgagtgtgataaaaatcagtcaaggcaacctaagtagcttgattcatcatacccgatttgcgatggcgacccaggatgtgcgttattatttgacgggcatgctgttcgatattggtgaaaatacactaactgcagttgcaacagatggacatcgcttggcggtggcacatcgattgctgaatgaaacttatgcgcccaatcaagtcatcattcctggtaaagcagtggctgaattagaacgcttgttgattgagcttgccaaaacggttgatgattctaatattgttgagcttggttttgatgcagagtttttacaagtgggcttggtgcttaaagatgaagacactgacaatgagattacagtgaaactgtctgcacgcttaattgagggtaaatttcccgactatcgccgtgtgattcctgccaataatgataaaattgttttatttaataaagatgaggcggtggatgtgttacgccgaatctcggtactaaataccaaagaagaaccgggcgtgctgatgaattttgataccacggatttttgtaaagtgggtgttaccaacagaaaccttggtgaggctgaagaaatgcttggggtgaattatagcggtgatgccattgagctgacctttaatgaggcgtatctgcgtgcagtacttaatgttttagaaggagaggtttgtcttgagctaaatcagccaagttcgcctgcactgatttatcaagtgggcgatgatttgcatcgctatgtcatcatgccaatgcgtcggtaagttatgattaagcagttgcaaatacatgagctgcgcaaccttaagcaggtaaatttaacgcttgcagcgtgtaatctgattgtcggagctaacggaagtggtaaaacatcgctgttggaggcggtgtttttgttgtcacgaggcaaaagctttcgtcatcatgagcctaaacgatatatccgccaccatcaaagtgcttgtaccgtatgggcacgcacaaaatttgaagagtcctgtacgcttgctatccaaaaaaagctcgatgagacaggcaagtctgactctattttaagatttaatgaacacaccgtttcaacccaaagtacgctaagctttcatttgccaaccttgctcatcgaccctgttagtatgagcttgctggatgaaggcagtatctctcggcgtcagatgcttgattggctgacttttcatattcagcctaagttttatcatcagtggctacaataccaacgcctactcaaacaaagaaacgctctactcaaacatcctagcgttcatcataagcttcctgagctgtttgcttgggatgaacagcttggattttatgcgcatgctttacacgagcatcgcttggcagtttttgatcaatggaccagatattttgatgagatgataaagcagcttttgcctgagtatcactcatcgcttagcctacaatatctggcaggttttgactataccaaacccttgagtcaaaccctaaaaatgcgtcttaatcaagacatgagcttaggttatacacgcataggtgcacatcgtgcagacatcaatgtcaaaattcattctcaaaacaatcaagggcaaacaatccacgaacaagccacgcatatcctatctcgtggcgaaaaaaaactcctcattactgccctaaaactgtctcagctaaagctgatgtgtcatgccatcgataagatacctatgcagacagcacatccgccagttgtattgattgatgatcttgatgctgaacttgatgaagatgccattgaaattttgctcaaaacggtattttcgttgccttgccaagcgattatcaccagccttaatgtacagacgcaccaaaaaatcttagcacttaagtctgatggctttatggcgacttctgcaccaaatcagcgtaccgccgaagacttatcttataagatgtttcatgtggaacagggtaaattccaagagtgcaacatttcataaagtcgataaaataactgccaaaagctaggcgtgacaatgactttttataaaaaaaatgctataatataccctgtttttttatgaataattgtgggtaatttgcttaaaaattaaccgccccacttaaggaagtttcatgaccgataataccaacaatcatccacaggtcgatgcacaagaaattgaatacaccgctaaaaatgtccgagttctgcgtgggcttgaggcggtgcgtgtccgcccaggtatgtatatcggtgataccgatgatggtacaggcttgcaccatatggtgtttgaggtggtggataatgccattgatgaggcattggcaggtcactgtgatgagattaatattatcgtccatgacgatgaatctgtttcggtgatggacaatgggcgtggtattcctgtggatacccaccctgaagaaggtgtatcagctgccgaggttattatgacggtgcttcatgcaggcggtaaatttgatgataattcatacaaagtatctggtggcctacatggtgttggcgtctcggtggtcaatgcactgtccaaaaagctgatcttaacgatttggcgtgatggttatgctcatacccaaaactatactgacggcgtgccagatgcgccactggctaagcttgagccgtctactcagacaggtactcaggtgcgtttttatccaagctttgagatttttaagggcgtgcaacactttgattacgatattcttgccaagcgtttgcgtgagttatcatttttaaattcaggggttcggattgttttaacggatgagcgtacaagtactactcaggtgtttgagcataaaggcggtttgtctgagtttgtcagttatattaatggcggcaaacacaccttaaacgatatttttcattttactgcagatggtgcagatggcatcggtgttgaggttgcgctgcaatggtcggacagctacaatgagaaggtactttgttttaccaataatattcctcaaaaagatggtgggacacacttatctgggtttcgttcagcgttgacacgttgtctaaatcattatttagactctgaaaatatcaccaaaaaagaaaaggttcaaatcacaggtgatgatgcgcgtgagggcttaaccgccatcatttctgttaaagtgcctgatcctaaatttagctcacaaaccaaagacaagctggtttcaagtgaagttaaatccgtggttgagaccgccatgcatgaacgattatctgagtatttacttgaaaatccgactgccgctaagatgattgcaagcaaaatcattgatgcagcacgggcgcgtgatgcagctcgcaaagcccgagaaatgacacgccgcaaaagtactttagacattgcaggtttgccgggcaaattggctgattgccaagaaaaagaccccgctttatctgaattgtttatcgttgagggcgactctgcgggtggttctgccaaacagggtcgtaatcgtaaaatgcaggcaattttacctttgaaaggtaaaattttaaatgttgagcgtgcacgatttgataaaatgctctcaagtgctgaggtggggacgctgattaccgctttgggtacaggtattggacctgacgaatacaatcctgacaaaattcgctaccataaaattgtcatcatgaccgatgcggatgtggatggtagccatattcgcactttgctcctgactttctttttccgtcaaatgccagagctgattgagcgtggtcatatttatattgctcagccaccgttatataaggtcaaacgcggcaagcaagaggtttatctaaaagataccgaagccttggatgcatatttgttatcatcaaccattgatgaccatcagctatttttgagtaaagatacgccgcctgtgactggcgtggcacttgaaaaactcttaaaagattacagtcaaagccaagtaattaaagcacatttgcaatcaaaatatccatcgcatctactagatgcacttactttgataccaaggcttgatgtctctgccattggcgataaacaggcagttgatgagtgggctttggcacttgaaaatcagcttaacgacctagagccaaagcttgatgccaaagttgaagcggtacaagtattgggcggggatgatggcaatggacattggctacctcgtgttacgcttcatattcatcgcctgccacatcagtatttattggatacgaattttttgggttctgctgactatatgcgtttattaaaactcagtgccaattggaataccgttttatctaacagtgcttttttgcgtcgtggtgacaaggatttcatcattaaagattttgagtatttatggcaacagttgatgcttgctgctcgccgtggtgtggatgtgcagcgttataaaggtctaggtgagatgaataaagagcagctttgggaaacgaccatggatcctgaaaatcgtcgtatgcttaaaatcaccattgaagatgcgatcaaggctgatcatttatttagttgcttaatgggtgatgaggttgaaccgcgtcgtatctttattgaagaaaatgcactaaatgccgatattgatacctaaatcaaacaccgatactcaaacagtatcggtgtttgactcagaccatacgaaaaattgtgtgatgtatgataatttaaatactcatgcgtattagctacttatttttatattcaaaaaatgctaaaatacgatcactttaactgctattgatttgattaaccgaaggtattttaatgaccaacattacccaagaccgcatccttattcttgattttggctcacaatatagccagcttattgctcgccgtgtgcgtgaggctggtgtgtattctgagattcatgcgtttgatatgtctgatgaagatattcgtgcatttaatcctaggggcattattttatctggcggccctgaaagtgttcatcaagaaggttcgcctcgagcaccaaaggctgtctttgagctcggggtgcctgttttgggtatctgttatggttttcagaccatgtccgaacaattaggtggcaaggtagaagctggattggtgcatgaatttggctatgccaagattgatatcacgcatcaagataaactgcttagcaaaatcaatgatgaaaaaaatcaatctcaagtttggatgagccatggcgataaggtggcaagcctaccaacaggtttcactgtaacatcttctacaccaaattgcccttatgcgtctgcttctgatgaagatcgtcagttgtacggtgtgcaatttcatcctgaggtgacacataccgaaaaaggagaacagctgatttctaattttgtgcatatcatttgtggttgtggtaatgcgtggaattctgaaaatatcattgagatgcgtattgagcaactcaaaaaccaaattggcaatcaaaaagtattacttggtctatcaggtggcgttgatagttctgtggttgcagcactgcttcatcgtgccatcggtgatcagctgacttgtgtgtttgtggataatggattattacgattaaatgaaggcgatcaggtgatgcaaatgtttgctgaaaacatgggcattcgtgtgattcgtgctgatagtgaggcgcgttttttaaatgcacttgcaggtgtgagtgatcctgaagcgaagcgtaaaatcattggccgtgagtttatcgaagtgttctcggaagaggcgcgtaagcttgatggcgttaagttcttggctcagggcacaatttatcctgatgtcatcgagtcagcagccagcaagcaaggcaaagcacatgtcatcaaatcacatcacaatgtgggtggtttgcctgatgatttggcatttgaattggttgagcctttgcgtgacttatttaaagatgaggtgcgtaagcttggcgttgcacttggcatcccgcatcatatgatttatcgccatccttttccaggtcctggattgggcgtgcgtattttgggtgaagttaaaaaagaatatgccgatatcttgcgtcttgcagatgatatttttatgcaagagcttagagcgtctggctggtatgataaaactgcccaagcttttgcagtatttgagcctgtcaaatcagtgggcgttgttggtgatggcaggcgctatgcatgggtgattgcactgcgtgccgttgagacggtagattttatgacggctcgttttgcacatttgccttatgagctgattgataaaatttcaacacgcatcatgaatgaaatcaaagaggtttctcgtgtggtgtatgatgtctcaagcaagccacctgcaacgattgaatgggaatgattggtggattaagttagcttatcgctcaaccaagcttggttgggcgatttttttatccttactttatgatctttaaattgtcataaaaaataagtcttattgtcatcatcactgattacaatgccatcaaaagtactatttatggagttgtgatgaaattttatatcgccaaaacacacattttcttagccctcatggtgggtttgtcatctatggcatgggcaaatcctgcggcaactttgacaggatttgccaaactggatgtcgaaacttatgccgcaggtccaatctcaggtagggcagccaagacagccaatggcatcgttgtaccctttaaagctcagccggttcaggggttttctggtgccctaaaaaaccatgatagcagctatactgtgttggcagataatggttatggcaccaaggataattcagcagattttttattgcggatttatcatcttgatgttgattttcgctccaaagaagggggtggtggtgaggtgaaagtgctggattttattcagcttcgtgatcctaacaagctcatcccttttgaaatcgttaatgaaaactcagctgacagactcttaacaggtgcagactttgaccctgaatctattcagcgaacctctgacggcagttattggattggtgaagagtttggaccctttttgctgcattttaataaagaaggcgtgttgattgatgcaccgatcgcattaccgcatccgaatcagaaaaatcagcagctgcgttcacctcaaaaccctttgaataccaattactcatcacctactaccgtgcagcgcagtggcggctttgaagggatggcgctgtcgagtgatggcaaatttttatatcccatgctagaaaagccattaactgatacaggcactaagcagttgctaatttctgaatttgatgtccagaaaaaagcttatacaggcaaccattactggtttgtgctggatgaaagagcgacagcgattggtgattttcagatgattaataaccgatcagggattgtaattgagcgagatgataccgaaaacgactggaatggctataaaaaattgatccgcattacgcttggtcggtcaggtcaagcagttgatcgcacggatcttgttgatctgatgaacattgataatcccgatcatttgtacggtcctgttcgagcaggcgatatgggtgtgggtcaaagattcacttttccattttttaccatcgaagatattatcattgaagatgatcgcactatcacagtgtttaatgataataattttccaggctcgtcagggcgtaatgcaaatttggcggatgataatgaaatcattcgtctaaatttacatcagcccctgcgctgattggaccgcttgatagcaactcacctgctaaaaaagctcaatttagatattgagctttttattaaaggcaatcaaaaaaacaagacagactcagcaatactttagtaacattaaatatcaattgttaaaaatttgtcaaagaatatgtaaatccttgtaattatcatgggtgttggctatgatacgccattatttttgagattttagtgaaactgcactgaaatcaacataaatccaccaaaggctaaaagcctaaggatcagatgatgaaaaagatttttgtagctgctttggcgctgtctgccttgtctgctcaagcggcgaccgtcacctactatggtgataagtttcatggcaaaaagacagcaagtggcgagagatttaaccaaaatgcaatgacctgtgccagtaatagccataaatttggcacgcatttaaaagttaccaacaccgccaatgataaatcagtgatttgccgagtgaatgaccgtggcggctttggtaaatatggcgtgactttagatttgtcaaaaggtgcatttgctaaaattgcaccactttctcaaggtcgtgcacgggtaatcattgaaaaggttgatgatttaattgcccaagacacccaaggtatcgaaagtagcacactggcacaagacagcctaagcgcacaaaaagtggctgaagcgttatcacaagttgaaaaagtatcaaccgaacacaccactcgcatcactttggcaagcaatacttcagtgactgaataagatgtaaaagcttatgataaaagcgacagatattgtggttggcacaggcaaaactgccgttaaaggtgctttgattatcactgaatacacaggctatctgatggatggcacggtgtttgatgcttctgtgcaccgtggtcgtccatttgagtgcgtgatcggcacaggtcgcgtgatcaaaggttgggatttgggcgtgctaggctttgatgactcgggggttggtgtggtgcccatgcaagttggcggcaggcgagaattaatcgtgcctgcacatttggcgtatggtgatcgtgcagttggtaaaattccacccaactcaccgctacgttttgagattgagctattagaagtgcgtactcgtgacgattgatgagatcgatgctcaaaagcatagcccgaccgccaaaagcttgctataataaacttaagcaagcttttttgatgcgtttcattatgtacttaaccagacacatcaacacagctttaaaaaacttgataggagcaagccttagtgattaagattgatcaatattttagccaagcccagtggcagaaatttacccaagcggcagaaggtcaagagacacctttattggtggttgatttgagccgaattaagaccaaatacgaagagatggtcacgctatttcctaaggcaaaaatccattatgccatgaaagcaagtcccgccaccgaagtggtcaaatatttggctgatttgggctcaaattttgattgtgcatcgatttatgaacttgaccgtgtcttagattgtggtgttacagctgaccgtatctcctatggtaataccatcaaaaaagcagtgcatattaagtatgcctataataagggtattgatttatacgcaactgattctaaagctgatctaattaatatcgctaataatgcccctggctcaaaggtatttgtccgtattttagtgcatggtgctgacacggccgaatggccgttatcacgcaaatttggctgccatcctgacatggcgatcgatttacttgtgcaagcaaaaaatctgggccttgtcccttatgggatctcatttcatgtgggcagtcagcaaaaagatgtggcagcgtgggatgatgcgcttgctaaggttaaatatatgtttgactggatgaaatatgaagaagggattaagcttcagatgatcaatttgggcggtggttttccaaccaattacatcagtgaagtcaacccaatttcagtctatgccgaagagattcaccgctatttgtccgaagattttgatgaagatgagatgcctgagattatcttagagccagggcgctctatggtgggcgacagtggcgttttggtctcagaagttgtcttgatcagtcgtaaatcacgcactgatttgacccgatgggtgtatacagatgtaggcttattccaaggcttgatcgaaactttgggtgaggcgatcaaatatcccgtctatacgccaaaaatggaaaccgccactgaaaaaggtacggtaattttggcaggcccaacctgcgatagtacagatattatgtatgaagatgcagcctataaattgcctcaaaatcttgaaattggcgataagttatactggctgacgacaggtgcctataccaactcttattcatcggttgaatttaatggctttccacccttgaaggtcaaatatattgaataatgtttcacatgaaacaaaaataaataacaaggtttgagatgtaattttcaaaatttggcgaaaaatttattcaaaatagccctatcttgcaactgatggatgatttgggtaatgctttaaatggcgatacaccgatcaatatgcttggcggtggcaatcctgcgaatattccagaagtatcagcagcatatcatgcagcgtatcaacaaatcgctaccaacggtacggcaatagaaagtatgagtaattacgcttcgccgcaaggtgatagtaaatttatcaaggtgcttgttgaattttttaatcgtcactatggttggggattgaccgctgatcatattgtgctgacgaatggctctcaaaacgcattcttttatttatttaatttgtttgcaggcaattttgtgatggcagtcataaatccattttactgcctttgtcgcctgaatatgtcggctatgctgatgtacaagttgagggttcttattttgtgtcgctgcccccaatcatcgaaaaaaccacacatgaaggtcgtgaaggattttttaaatataaagtggattttgatgctcttgaaaatttagaagaattaaataataataaaattggtgcaatttgctgttcacgcccaaccaatccaacgggcaatgtactgacagacggtgagatggcacacctaaaacagcttgccaaaatgcacggcatacctttaattattgataatgcctacggtgcgccgtttccaaatattatccacaccagcacaacccttgagtgggatgatgaggccatcttatgctttggcctatcaaagatcggtctgctaggcgtgcgcacgggtatcatcattgcgcatccaaaggttactaaggctgtcagtaacatgaacgccattgtgaatctatcgccggtacgctttggggcggcgattgccacaccattatttgaaaatgatgagattatttgcctgtctgatgagctcatctccccattttataaaaaacagtcaatatttgctatccgtcgcctccaagaagaatttgcagattatcctgtttatatccatcagcctgaaggcgcgatttttctgtgggtgtggtttgagggcttaccgatttctacgaccaagctgtatcagattttaaagcaacaaggcacgctgattatcccaagtgagcatttttttgtgggaatgcagacggcggattatccacacgccaaagagtgtatccgcttgtcgattgcccaagacgatcacacacttgaccaaggcatcaaaacgattggtgaagtggttaggcggttgtatcacaattaaaaaataccgcagctcatcggctgcggtcttgtttgggttatgattgggcggctgttaccatgatctcaacgagccagtttggattgaccaagttggcttggatggttgcgcgtactggcggcgttgagcctgccatccattctttccaagcgttattaaagccttcaaaatcctccaaatttttgatgaacacttgagcagatagcaagtgatttttgtcggtgcctgccaaagccaatgccttatcgatattagcaaagacttggcgtgactgcccagcgatgtcaaggctatcatcgtcaggtacttgacctgccaaataaaccacactgccatgaaccgccacttcgcttaaggtgtcattgctgtcaaatttttggatgatactcataattttccttatgctgattgataacgggttaatgataggccatcaaggctgatgctgggtgtctgatgggtaatgatatcactgattaggctgcctgaaccacaagacatggtccaacctaaggtaccatgcccagtattgagatacaaattttttagatcagtttggccaatgatgggcgtaccgtctggtgtcatgggtcgaagacccgtccaaaaggttgcgttttttaaatctccgccatcaaacaagcttttggtaaccatctcaagtgtctcacggcgtttttgtcgtaaattcaaatcaaagccacttaactccgccataccgcccacacgaatgcgttgattaaatcgtgtgatggcaattttataggtttcatcaatgacggtggaaatgggtgcacggctttcatcaataataggcacagtcaatgaatatcctttaactggatatacgggtaaatcaagccccagcgactttgccatcgcccgtgaataactgcccaatgcaagcacataactgtctgcagtgatgagctcaccgtcagcgatgacgccagtaatggtttggttattatgagtgattttgtcaattgtggtattaaaacgaaattcaacgcccatatctttgcagatctcagccagtgctttggtgaataaattacagtcgccagtttcgtcgtgcggcaatcttagaccgcccgtcagctgtgcggccgcatgagccaaagcaggttcagcttggctgagactgtttttatctagtagctcataatccacgccgcattcttttaatacttcaatgtctttgccgacctgatcaagctgtgcttgggtgcgaaatagctgaagtgtgccttgggtgcgatgttcataatcaataccagtatcaagacgcaactgacgaaaacagtctcggctgtactcagccacccgcatcatgcgtgatttattgatggtatagcgtttatgggtacagtttttgagcatttgggtcagccacgacatttgaaagcttgacccatcagggcgaatcgctaatggcgcatgtttttgaaatagccatttaatcgcttttgtgggaatttgaggggcagcccatggtgttgagtagcctggtgagatttgcccagcattaccaaaacttgtctcctgggcaaccgtgtgttgacgctcaatgacggtcacttgaacgccttttttggcaagataatacgccgttgtggtgccgatgacgccgccacccaaaaccaaaactttcatgcgatattcctaagagacaaaaataattatgcgtatatgataacaggcagatgcgatgactgacaagccaaaaacgcatatcattaaaaatatttatcctcttaaaattatgctatactaatctttgtaacttgacggagtacagccaagcagctgttgagattgttttactgtgatattattgaatgtattatcataaagttataaacaaataccgttgaacctgaaggttaagacctgcgtaggaatcaagtgaattaaagatgtgtcatgaaattagcccgtttcattgacaagttctttaaatggcttgattgataaagccaatttaaggacatgccatgagccaaccgaccaacccagctttaaaccaaatcattgcccaacatgatgaagatgccaaagatttaacccgagtcttgcctgcttctaaaaaggtgtatatccaagggtctcgccctgatattgccgtaccatttcgtgaaattagcttaacagatacaccaacagggcttgcccaaggtggccttgagaaaaatgagccaattttggtttatgatacctcaggtgtttataccgaccctaatgtacaaattgacctaaataaaggtctgcctcatgtacgtcaaaactggattcttgagcgtgatgatagtgaagagcttagtggattaacctcccaatttgggcgtgagcgtcttaaagatattcgcacccaaaacattcgttttgcccatatatcaaaaccacgccgagctaaattgggtaaaaatatcactcaaatgcactatgccaagcaaggtatcattacccctgaaatggaatacatcgccattcgtgaaaatcagcgtcagcgtgaaggcattgatatgcgtcagcaccaaggacaaaactttggggcaaataatttaatacagattaccccagaatttgtccgctctgaggttgctgcagggcgtgcgattatccctgccaatattaaccatccagaatgtgagccaatgattattgggcgtaattttttggtaaaaatcaatgccaatattggcaattctgctttaggttctagcatcgaagaagaggttgctaagatgacatgggcgacccgctggggggcagataccatcatggacttgtcgacgggtaaaaatatccacgagacacgagaatggattatccgtaattcacctgtgccgattggcacagtgccgatttatcaggcgttagaaaaagtcggtggcgtacagaagatttaacttgggagatttttaaagacacactcatcgagcaagctgaacagggcgtggattattttaccattcatgcaggcgtgctacttcgttatgtacctctgactgccaatcgtttgacaggcattgtcagccgtggcggctctatcatggcacaatggtgcttagctcaccatcaagaaaactttttatacacacattttgatgagatttgtgagattatgaaagcttatgatgtgtcatttagtttgggtgatgggctaagacctggctgtatccaagatgctaatgatgaagcacaatttggtgagctgcacacactgggcgagcttacccaaagagcatgggcacatgatgttcaggtcatgattgaagggcctgggcatgtacccatgcatatgattaaacaaaacatggatttgcaattggatgtgtgtaaagaagcgccattttatacgctgggacctctaacaactgatatcgcacctggctatgaccacatcaccagtgcgataggggcggcgatgattggttggtatggtacagcaatgctgtgctatgttacgccaaaagagcatttgggtctgcctaataaaaaagatgttaaagatggtatcattacttacaaaatcgccgcccacgctgctgatttggcaaaaggacaccctggcgcccaagtgcgtgacaatgccctgtctaaggctcgctttgagtttcgctgggaggatcagtttaacttatcgcttgatccagatacggctcgctctatgcatgatgagaccatgcctaaagaagcccataaatcggcacatttttgttctatgtgtggccctaaattttgctccatgaagattacccaaaatgtccgtgactatgccaagggattggatgtggaaagaggactacaacaaatgaaagaaaaatataaagaagaaggcagtaagctgtatcacgaagtatgattttacttaatttatattttgggatatttttcaagatggcttgttggatggatgttcggcaagccattaaattctgttataatggataattgtattcataaaattggtaacttatgtcgttcttttcatattttgaaaaacgtttagagtcttttcctgatattagcctgcccactcatacccattcgctggcttcatttatttatgcctgtactttgggatatcgtggttggcttttgttatttacagtattaacagcaatttcaggcatctattgggcatatgtgtatgcgtggattgggcaaattgttgactggcttagtgtgtattctcccagtgaattttgggcacaaaaaaaatcagatctattgatcatgctggcaatcagtgcattcattccgctggtgcttttgtttgagacaaccattcaccatcaggtactacaaggggtagtgccaatgcgtttacgctggatttttcatcagcaaatgctgggccagtcgatgcaattttatcaagatgaattctctggccgtgtgtcagccaaggtgatgcaaactgctttagcggtgcgtgatgtggtcatgacgctgattggtgtgtttgtctttattctcacatttttggtgggagcaggggctgttttgactgggattcacccactactgacagtgccatttgtattttggattttagcggtttcggctttattggtatttgtattgccacgccttcagcgtaccagtcggatacaggcggatgctcgtgctttgatgacaggtcgaattaccgatgcttatgctaatatcaacacagtgaagctatttagccattcacaccgagaatctggctatgccaaagaagccatgaaacattttttgggcacagtgcatgaccagatgcgacttgtctcactgcttgaaattttggtttctgtgattgctgtcttgacggtctcaggatcggttgcgatgagcgtgtatttgtggatgtctggcgtggtgggcgcaggtgcagttgcggtttcaggggcacttgctattcgtttgcagggtctgacccattgggtactttgggagacggcgggattatttgaatatctaggcacggttcaagacggtatgaagactttgaccacgccacatcatgtggtagatgaccctaatgcccaagtgtttcatgtgaaacaaggacagattgattttaagcaagtttcatttaactatggtaaaaaagaccaaagccaaccattgcttgatgattttagtttatccatcaaggcaggcgaaaaagtcggattggtaggtcgctcaggggcaggtaagtccacgctggttaatttgcttttgcgattttatgatattgatggcggtcaaatttacattgaccagcaagatattaagaccatcacccaagaatctttgcgtcaaaatatcggcatggttacccaagatacttcgctactacatcgtacagtgcgtgaaaatatcgcttatggtcgtcctgatgccaccgatgatgagattatcgcagctgctaaagcagctcacgcatgggattttatccagactttaaaagataaatttggcaatacagggcttgatacacaggttggcgagcgtggtgtcaaactatcaggtggtcaacgccagcgtatcgctatcgctcgtgtgatgcttaaaaatgcaccaattttattgcttgatgaagcgaccagtgcgttagatagtgaagttgaacatgccatcacccaaagccttgatgatatgatggcaggcaaaactgtcatcgccatcgcccatcggttatcaacgatcgcctcgatggataagcttgtggtgatggatcggggtcatatcgtagaaatgggcagtcatgatgagctgattgccaaaaatggcgtgtatgcatcgctttgggcacgccaaagtggtgggtttttggccgaccattaaattatcctagtaaaatgcccaaaaacatgactgagttatgtttttgggcattttagcggcttatttttaaaggataaggcaggatacttaatttgtccaaatatgttgtaaatgatatttgatcaaatttattgatattaataaattcttgtcatttatcattcgtagaccgtggattggtttaggcggttttgggattgataattcgttcatgaccccgtttaattgctgataatacttgatttggtgcagtaccgccaatgtgattgcgtgcagttagtgaaccttctaaagttaggcaatcaaagacatcacattctatcagtgggctaaaactttgaagttcatctaatgaaagctcactaagatccacgccttttgagacaccaagcccaaccgctttacccaccacctcatgtgcatcacgaaatggtaagccttttttgaccaaatagtctgctagatcagttgctgtggcatatcctttcatggtcgctgcacgcatattgtccacatttgggatgatatttggcaacatatcagcaaaggcaagcaggctaccagttaaggtgtccacgcagtcaaacagtggctctttatcctcttggttatctttgttataagccagtggctgatttttcatgagtgtcagcaaagtggtgagctgcccaaagacacgcgctgccttgccacgcaccaattctggtacatcagggtttttcttttggggcatgatggatgaacctgtgcaaaatcgatcaggaatatgaataaagccaaactgtgcactcatccacaagatcagctcttcgctcatgcgtgataaatgcatcattaagatagacgcattggcagtaaattcaatggcaaaatcacggtcagacaccgcatctagtgagttttggcaaatgccctcaaagccgagcaggcgtgcggtgatggtgcgatcaattggataggtagtacctgccaaagcagccgaacctagcggcatttgattaattcggtggcgtgtatctacaaagcgttcgctgtcacgcacaagcatttcaaaccatgccatgacatgatgcccaaagctgacaggctgagcggtctgaagatgggtaaagccgggcatgatggtcttagtgtggttggctgccaaatccaaaagtccactttgtagtttggcaagcagcaccagaatattatccgtctcatcacgcagccataggcgaatgtctgtagcaacttggtcattgcgactgcgaccagtgtgcaattttttaccgacatcaccgataagtgtcgtcaagcggctttcgatattcatatgcacatcctcaagcactaccgaccactgaaacttaccgtcatcaatctcggcttgaatttgggtaaggccgttaatgatttgacaagattcatcttgggtgatgatgccacacatacccagcatggtggcgtgggcgatagagccttgaatatcttggcgtgccatccgcttatcaaaattgaccgatgcggtaaattctgcgacaaaactgtccgtcgcctctgaaaaacgaccgccccacatgcttgaagtttgttcgctcatgctaattccttgtatgactttaaatgataaaatgtctccaaagtatagcataattttaggcggtatatgatggtactttatctaaattttataacataattaataaaaataactaattaataataattggtataaagatgatgaacaaatccatggtagatgttggtatttgatcgccaaatttcttataatagattaaatttatcaaaaatttggatcacatatgaccatacgcaccctaaccattgccacacgccaaagcccattggcactgtggcaggcgaattttatcaaagcaaaacttgaacagctttacccatctttgtcagttgagctgcttgagatggtgacaaaaggtgataagattttggatacaccacttgccaaaattggtggtaaggggctgtttgtcaaggagcttgaacaggctttgtatgataagcgtgctgatattgcagtgcattcactcaaagatgtaccgatgatactacctgaggggctgatgcttggggcttattgtgagcgtcatgcaccgacagatgcttttgtgtctaatcattttgagcatttggatgatttgccgacaggggcaattcttggcacatccagtctacgccgtgagtgtcagctgcgtcaggcacgacctgatttggacatcaaaagtttgcgtggcaatgtcggcactcggttgggtaagcttgatgcaggagaatatgacgccattatcttggcgacaagtggtcttgagcggttgggtttgcatgagcggattcgtcatgagcttgatgatgaactgtctttgcctgcggtggggcagggggcgcttgccattgagtgccgtagcgatgatgaagcaattaagctgttgttatctccgcttaatcaccccaagacacgcctgtgtgtgttggctgagcgtgctatgaatcgtgcccttgaaggcggttgccaagtaccgattgcaggctttgctgtgattgaagatggtatgttgactctgcgtggacgagtcggctcagtggacggtaagaccttattaaaagcacaacagtcacacaagcttatgggtgaaatccaactggatgaacaagcagccgaacaacttgggatagatgtcgcacatgagttactcatgcaaggtgcggatgatattttaaaacaagtttatcaaaatgcccttaattcatgatgtcaactttactcattaacacccgacccaagcaccgtgggcaagccattcgtcaaatgacgggtatgccagtcattgatctgccgctgttagacatccagacgctgcccatgacagagaccaaagcatcgatgatgcgtgcatggcttgattatgactatgatgtgcttgtggtgaccagcgttgagtcagcacggcgagcacttgaatatttagataagttgcatggtggccatcattggcaatccaagttgcctaatgcacccattgttgctgttggtttggcaactgccaaagtattgactgatcgtgggctgcctgttgttttacctagggttactaataacgagggtatgctggcaatgactgagattcggtcgctgatatcaggcagtcgggttttgatttggcggggtgctggtgggcgtaagctgttacatgagacattaaaagcacgaggcgttcagattgatgtcattcgttggtatgagcgatttattcccatggatttgatggataattttcagaaaaatttaaaaataatcaacgaaaaagctgatgtctttgtcattattagtagcgaaatggcctatcaagcatggcggaggttgccgcatcatagacagtatcactatttggcactgggtgagcggcttaagaatatcatccatgcttatgagcctgatgtgatggttgatgagcttgtgacgcttgagcctactgaaatttaccaagtaattcaccaaaatttctgactctaaaataaactaagccatgctaagcctactggtatgatgatcaattttaatcactcaaagataatatcatgaaaaaacgcagtcaaaaaacagataatcaaagctttaaatcttcttctaaagaaaaactgaacaaaccacatcaccaagccaagccagccaagcccaaaaatccgtacttttatggcattcatgctgttagtatgttgattaaacgccgtcctgaagaggtgcttggtttatttattcagttgcgtgacgatgggcagatgagttcagagcatcagctgattgttcagtctgccaagcattttggtatcagtatccaaaatgctcaccgtgagcgattgaccgagctttgtggcagtcagcaacatcaaggcgtggttgctctggcacgcaccgcaccgatggcagatgagacgattctggataatttgcttatgcaagatgatgtgctgtttttggtactcgatcagattacagatgctcataatctaggtgcctgcttgcgtaccgcttgtgcgatgggtgtggatgcagttattcttcctcgacaccagtcagcaccgataacaccgactgtggctaaggtttccgttggggcttctgaggtcatccctgtgatatcggtaaccaatttggctcgaacactagaaaaaatgaaaaaatcaggtgtatttatttttggaacggcacttgataagtctgctaagccagcatttgaatgtgattttgggggtaaggttgccatcatcatgggttcagaaggtgatggcatgcgtcgattaactcaaacgatgtgtgatactttggtatatattcctatggcagaagttttggatcgtcctcaaagcctcaatgtcagtgttgccacaggaatggtgttatatgaggtgatgcgtcaaagacgagggtttgggcaaatgccgcttgtttaattcttatcatctttgcccataaaatcagtcaaatgatgatatatttgactgattttatttgatttttaagcttgtttggcaatcttgcttaatttattgcgagcggtatcgtcaatcttgtcgatattactttcgcatttattggggtcattgccacaaaattggcaatgttcatcacccattaaggtcgccacaccgccacaagatcccttaagtggcttttttttgacaaaatagccaacacccataaataagaaaaataaaataaaaatcccaaaggtgacaaaaaagatgggaataaattgatttaaaatgtcgctcatggcttctccgtgtagtgaagtagcagatttattagataagatagtataacactttatcagcaccccaatgtaatgattttagggtttttatgttgccaattcaataaaaatagcccatcatgaatgggctattttggtgaagtcaataagtgattacttgtctttgacttcggtgaattcagcgtcaacgacaccatcatcagcgggttttgcttgttcttgttgtggctcagcaccttgagcacctgcatcagcgtagattttttggctgattggcaagaacgcattatctaaagcttcaagtttagctttgatgtcatcagcatcatcttctttggcagcagcttcaagtgcactgatggcagattcaacagcagtagtctcttcagttgtaactttatcaccagcttcttttagtgctttttggacagcatgaatacgaccatctgcttcattacgagcatttgcaaggttagcaaacttctcatcttcggcagcatttgcctcagcggtgcgaatcatctcttcaatttcagattctgatagaccagagtctgccttaatctgaatagattgtgatttacctgtgcctttatctttagcactgatattcatgataccatcagcgttgatatcaaaagtaacctcaatttgtggtacaccacgaggtgcaggtggaatatccgttaagtcaaagttacccaacagtttattttggttggcgattttacgctcaccttgataaacttggattgataccgctggttgattatctgctgctgttgagaatacctgtgattttttggtgggaatcatggtgtttttctcaatgattggtgtcatcacaccgcccatcgtttcgatacctagagttaatggcgtcacatcaagtagcagaacatcttttttatcaccagacagtaccgcaccttggatagcagcacccatggcaactgcttcatctgggttgacatctttacgaggttctttaccaaaaaattcttgaactttttgttgaaccagtggcatacgagtttgaccaccaaccaaaatcacatcatcaatatcgcttgctgataagccagcatcttcaagagcagttttgcaagggataattgtgcgagcaaccatatcctcagtcaagctttcaagcttagcacggctgatggtaaccaccaagtgctttggacctgagctatctgcagtaatgtaaggcaagtttacttccgttgattggctgcttgatagctcaattttggctttttcggcagcttcttttagacgctgcattgccaaagggtcgccttttaagttaacatcttgttcttttttaaactcttcaaccaaataatcaatcaatgctaagtcaaaatcttcgccgcccaagtgggtatcgccattggtcgctaaaacttcaaattgctgatcgccatcgacatcggcaatctcgatgattgatacatcaaatgtaccaccacccaaatcataaactgccacagttttatcaccaccttttttatccataccgtatgccaaagcggctgcagttggttcgttgatgatgcgtttgacatccagacctgcaattttacctgcatctttggttgcttgacgctgggcatcattaaaataggcaggtacagtaacgacagcttcggttacagcttcgccaagatagtcttcggcggtttttttcattttgcgtaaaacttcagcactgatctgtggcggtgcttgttttttatcattgacctcaacccaagcatcgccattatctgctttgacaattttaaaaggtacaagtgagatgtctttttggacttctttatcttcaaaacgacgaccgattaggcgtttgattgcaaataaagtattttttgggttggtgaccgcttgacgcttagccgcttgaccgaccaaagtttcaccatctttaaatgccacaatcgatggtgtggtgcgtgcaccttctgcgttttcaattactttgactttatcaccttcaagtactgccacacatgagttggttgtacctaggtcaataccaataactttagccataatttactccagatttaaaattattttaatgttgaaattattgatgcttagttaagctttaaaatttaatttaaaatactaccaagcttgggtgttatatttgttttatttttggcttttcaagggggggttcaacttttttcaaaaaaaattattttatttaactgattgaaattgttcaataaatacccaagatttgacttaagcccctaccattaccatcgcaggtcttaaggtgcgttcgttgagaatgtagcctttttgaagcacctgaccgatgatatctttctcggcttctgggaaaatacccaccgcttcatgaatctctggattgaatgtatcaccgacattacccacggccacgacgccatttttttcaagaacgctaagcagtactttatgtgttaggcgaatgcctttaagtgatgcgtcatctgcacctgtctcttcagcatctttaatggcacgctctaggttgtcaaccacctccaaaagctctttggcaaacttttgtagtgcaaattttttggctttgtcggtttcttgttccatgcggcgttgggcgttatagctttcggcattggcacgcgcagcagtctctttggcttctttgacttcattttctagcgcttggatttggctatgaagtgcttcgacttgctcggttgtcgtctcagccataatctcttccatagtggtttgttcggtggtttgctcggtcataaattgccccaaaaaagttaatataaattccccatcttcataatggttaaggataaaattttcaagggattggcacaaaaattttaaataatcagcgtagccatagaacaaaatttctaagcgacctgtgtggtcgtgaagaacagaacaattggtgagcggattaatcgctttttctaagcgacctgtgcggtcgtgaagcttgtcatcgtgcaaaatgtcggcgatgatgttttctaagcgacctgtgcggtcgtgaaggatgtgcgtgtgtgggcggctgggcggtgctatttctaagcgacctgtgtggtcgtgaagaaagtgcagtcaggcggtgtggtgtcaggcattttctaagcgacctgtgcggtcgtgaagaactgacgctgtacttgctttatttgcaagcttttctaagcgacctgtgcggtcgtgaaggtgaatggtcatacatcatctatccgtgattttttctaagcgacctgtgcggtcgtgaaggccattgctgttaattttcatgcgactagcagtttctaagcgacctgtgcggtcgtgaagtttgaagtttaatcagctcaaaaagatttgactttctaagcgacctgtgcggtcgtgaagtttagtcttggttaacgcttcccatgcaactgtttctaagcgacctgtgcggccgtgaagagttaattgctcttgctttcttgtcaaagctctttctaagcgacctgtgcggtcgtgaagggggagcgttgcgtcagcagaaccgtgaaaattttctaagcgacctgtgcggtcgtgaaggatattcggagcggtaatttgcgtatttgctctttctaagcgacctgtgcggtcgtgaagtacgcattaacacagttgaaagctctgttagctttctaagcgacctgtgcggtcgtgaagatcaaagcggtcagcatgatgccagcggctagtttctaagcgacctgtgcggtcgtgaaggtgggtgtttgactttgtggccatcatttttgtttctaagcgacctgtgcggtcgtgaagaatttgtggcgtgcgtcctttgccccctgatttttctaagcgacctgtgcggtcgtgaagggtgcttagctcgttttgagcggtggcaagcttttctaagcgacctgtgcggtcgtgaaggcggtgagtaaagcgtgggtgtttgactttgttttctaagcgacctgtgcggtcgtgaaggtggccatcatttttggggcgtatgaccccactttctaagcgacctgtgcggtcgtgaaggaatgcctaaatgtgggtacattttagccaaatttctaagcgacctgtgcggtcgtgaagcttatatgcgttttgtgtgtgtgcgggcggcttttctaagcgacctgtgcggtcgtgaaggtaggcggtatttctcagatgctcatgccaaatttctaagcgacctgtgcggtcgtgaagactgacaagctcggaggtgctattaggcgtgattttctaagcgacctgtgcggtcgtgaagagttagtataaaccaaaataataagaaataacaagtcattatgataaaatttgtcaaaaacccaatcaaaaatcttcatgttataacttattgaaaatattcaagtttttaaatagtaaaaaaataaagggtcaatcagttatttttccatcttctggttgagttatcttaaaacattttaatcgctaaatacaattaaaaaatgattggtataaatttatttttagtttataatccaataaaatcatattaaatgatgttgaaaattgttaggataaaattgaatcattaaacatggatttgtattattatgaatacgctcaaaccgaccgatttgaaagcaattttacactccaaacgggcgaatttattttatcttgagcattgccgagtcatgcaaaaagatgggcgtatcttatacctgaccgaaacgaaataccaaaaccactattataatattccgatcgccaacacgacggtcattttacttggcacaggcacttctattacacaagcagcgatgcgtctgcttgctggtgctggcgtgttggttggcttttgtgggggcggtgcgacgccattattttcaggggtagaaatacagtggcttagtccacaaaatgaatatcgcccgaccgaatatgtccaaggctggctgtctttttggtttgatgataaaaaacggctcacgattgccaaagtgtttcaaaaacaacgcctagaatttacccaaaaagtttggttaaaagacaagcagctacaagaagcaggatttgatatcacagactatgatgtcgtacaactacataccgcatttacaaataaaattgagcaagtagacagcgttggtgatcttttgttggctgaagcattgatgaccaagcggttgtatcactatgcaaaaaccaagtgtgcattatcgtttgagcgggattttcatgcaagtgatgatgccaatcgttttttgaatcatggtaattatttggcgtatggtttaggagcttgtactttgtgggtgcttggcattccgcatgggtttgcggtgatgcatggtaagacacggcgtggggcgcttgtttttgatgtggcagatttagtaaaagatgccattgttctgccgtggtcatttgtttgtgcgaaacaaaattttacagaacaagaatttcgccaaaaaatcttacaaaaattcaccgagtataaggcactggattttatgtttagtcaagtcaaattggcgtcgcagtattttaaaggcgtataaaatgattgtgacctttatttcccaatgtgaaaaaaaggcactgcaacgcacacgccttgtgttagatgcgtttgccaatcgcatcggtcataatacttggcagaccgtcattaccgaagatgggcttgtcatggtcaaaaaactgcttgcacgtaccgcaagcaaaaataccgccatcagctgttaccgctttcacacacgcaaacacagcgagctgttgtggattgtgggtaatcgccataaatttaatgaatatggctgggtgccagtgaaccaaacacgccgtaatattttgcacagtgaatggcaaaatgattggtactatatcagtgccatccaaatcatcgcaactttggcagcactgctacatgatttgggcaaatctacgcttggttttcagcataagctaaaacatggcagcacccaaggcgatccttatcgccacgaatggatttcgctgaaaattttgctttggctgatccaagattgtcaaactgattctcagtggttagaacgctttggacgcattgatgagtggctaaagacccaaaaattatcagcgttaaatgattatttaaaaccttgtaatttggatcatgccgatttatccaaattgccgccacttgggcagtgggtggcttggcttgttgttagccatcatcgtttgccacctttggtcaatgtatttttaaaggaacaagaacgcataagttttcaaacaaatgcctcaaccttaaaattatattttgaacgcccgctaactaagatttatgcagatttcaccgccaacgaccattgggtaaaaaatcccagaacctttgaaacagctcataaagccaataaaaaattggttgatttttggcaatttgatcagtgcgtgattgacagtaacgcttggcaaagtcgcataaagcgttgggcaaacaaagccataaaagacccaactttacaagcactgtctgcacaagataagccgattgataatgccattttactgtatttatcacggctgtgtttaatggtcggtgaccataactactcttcattaaaagatggcgaccatcgccgtgttgccacaaaatcctctttaaatctacttgccaataccaaccgtaaaacaaaacaacctaagcaatttttagatgagcatttgctgggtgttgcttcctttacggcacattttgctcgctatttaccgattatcggtgagcaattaccgacattgctgtcgcatcgcccattaagcaaaaataccaatattgagcgatttgtttggcaaaattatgcctttaacatagccaaaagtgtgcaggctgatagtgatgtgcatggcttttttggggttaatatggcatctactggctgtggcaagaccattggtaatgctcgcattatgtatggcttatcagatgagaaaaaaggggcaagattcaccattgcgttagggctgcgtgtattgactttgcaaacaggcctaagtttgcgtcaggatttacagttaagtgatgaggtcttggcgattttggtgggtggcggcggtattcggcagttatttgaaatcggtgaacaacaaaaaaaccaagatgactcaagtacagcttggggcagtgaatcagcagaggcactggtagatggctttgtcgattttgcgtctgagtatcatgctgcccatcttgagctggctaagctgaatattgatactttattggctgataataaagccaaagatttactattttctccgatagtcacttgtaccattgatcatctgattggggcgagtgaatgtaagcgaggcggtggctatatcacaccgatgcttcggctgcttagtagcgatttgattttagatgaacctgatgaatttgatcataatgacttgcctgcattagcacggctcgtgcatttggcaggcatgtttggttcaaaggtgttgctgtcatcagcaacgctaccgcctgatttggttgctggcttatttgaaagttatttagctggacgcaaattgttcaatcaaagccaaaataaacctgcaccacaaaccgtctgtgcgtggtttgatgaacaaaaacatggcagtatggtgatatcttgtgataaggtggagacctttaggcaacagcagcaaatttttatcaaaaaacgcatcagctttttacagcaacagcccatccgccgtaaagctgaaattctgcctgtcggcatggcttatcatcaagataaaaaagctgaattttatagcacattggcacaaaatatcattgatggtgctgttcggttgcatcattgttatcatactgttgataaaaaaacgggcaaaagtgccagcattggcttggtgcggattgcaaatatcaaacagctaacacgcattgcgttttatctgcaacatgctcaagtcaaccaaaatacacatatccatgtggtgtgctatcacgcacgacagcttttgattttgcgaaatcgcttggagcgtcgcttagataaagtattaaaacgcagtgagcatgacgaacagctgctttttactcatgatgacattgtgcagcagatgaccaaaagtcaggctaagcagcatatttttatggtattggcaacacctgtggcagaggtggggcgtgatcatgattatgattgggcgattgttgagccaagttcaatgcgatcaatcattcagttggctggtcgagtatggcgacatcgcccaaataaacaggtgcttgatagcaatatcttgatactcaataaaaatattcgtgcattacaaaatcaccatggacctgtatttaccaaacctggctttgaaaccaaaaaatataagcttacagaacatgacatgaccgccttaatgagcgataatcatctaagccaaattgatgctcgcccacgcatttggacagataccatcaaagatagacccgaaagcttggagcaattggaacatactttgatgcatgatttatttggggcaaataaaaccaattatatcaatgcctattggcgagaagcgggagcatctaatcggatacatactcatttgcagcaagtgtcgccatttcggcacagcatacagcaagatgaagcgtgggtgctgattcccaaccaaatcgtagatggtcagggtgatggatttagggtatatgccatggaggatattaatcaaaatggtttatcacatgccaatctgcacaaccattatattcaaatgatggattttgattatcatcacgcacaaattagcacttggctggtctgtgatgtgtacgatgaaattaggcggttacagacacatttgatggtgcgtaatttatcccatgtggcaatacaatttagcaaagtaatgctagatagtcggcaatctcaatggtatttttcaccctttttaggtatgatgtcagagcgacttgactgctagccacaccaagcgacctgtgcggttgttattggtgccttaagacattgctttttcagcggtttataccaaaaaaaatggcgatgttaacttttcgttaagatttatggttaattttttaaatatagcttaatccatcgtattcatagataaataaaggaagttttcatcatgacaacaaacgaccttgccaaaactgcagtcagtcgatttttacaaaatcaaattgcaatcaaatcagaaaaattacaaaaacagcttaccaaagctcaagaagatggtgatgtaacgacaattggtcaacttcaatcacagattcaagaaattgagcaaagattcaagaaaagtgtttggcttgatttggcggcaaataggtggacacaatggatgacatttggcacacatatctctaaaggcattcatcttagtgccagaggtgataatgttaattttgtttttaatagacagctgcccaatactttaataggcacgcacagccttaccgatccagtactagatgccagtggtcatgcagcggcactgcctttggcgacattctttgattttgatgtggcagatggtcttaaaatacgagatttaattcttcaaaatcatgctggctttatcagctctttatctgatgatgagcgtatggcggcaaattatcatagtgcttttaaaaaagccctgcaaaataacacggataacccaagcacacatgagctcaataaacagctactttggcatatcaatgccgacaccgcttgccagcttaatgagctggactatatcaatattatcccattatatccatcagtattgactcatggggtttatttaaaaattaatcaattaagatattctgatgataataaaaaagccttagagaaccgctttaaatccaatgcactgcatatatcttatgtcagtatgccaaatttggcaatcgtacaattgggcggctcaaaaccgcaaaatatcagccagctcacaagccgacaaggcgggcgtaactatttattgccctcattgccgcccaaaataagccaagaccgtgaattttctttatctaaattttgtgaaaacttttttgagagtaaaactttaaaataccatattcaagatgattttaattatgtggttcaagtcgttaaagataccagaaatacaatcgatgtgcgagataaacgcaaagatgccatagaccgcttattgcatacgatttttggcattgcccatgtattacaaaataaaccagcaggctggtcaaagacttatgcactgccacttgcccaaaaaatatggctagatccttatcgtgctgatttagacggtgaggccaagtttgctgacgaaaaaaccaagcaggaatggcaaaaaatcattttacaagattttgcgtcttggtttaatcagcagttgcgtagcacggtcaaagagctaaaatttgattttgcagatgcagaatataatgagtggcaacgagaaattgaagagatgcaaaaattttatgaacgcttaggcaagggggtgtttttatgaacgataaagttagggtagggtgtgtatattttcacaaaatggtgatttatgatgccaatacaatttctagccctttgacctatggtttgcctgcactaacaggatttacaggcgcatttcatgccttatcacgcaccttaatggcagatgagcgatttgctgatttggcattaggtggtgtgctactggcttgttatgaatgcacgcccaaaacttatcaagcgggcagatatcatgaccatacttttaatcaaactcgtaatccactcaaaaaagatggtaagacagccccaattgtggaggaaggtaagtgtaatttggtgatgagttttgctgtggaggtattagcgtctgatttgctttcagaaaaacgcagtcaagagctgacccaatttttatcacaagccatttttaggcagcgtattgctggcggtagtgtgatgaatattgccaaaacccatcctgtgcggtattttggttttgaaagtatgcatcagatagtaccacttttaatgcctgcatttgttttgatggatgccagttctgaatttagcgaattgattgataaagcccaaagtaccgatccaaaagccacaccgcttgatgtactgcttgatgtgtgtacactacaccatctgccaaagctggatttagatggtaataccaaatggcacaccaaatccatcaaaacaggacatggctggattgtacctatgccaatgggctatcaggcaattagcgaacaatttgaggccggtaaaatggacaatgtgcgtaatcctgagtatccaagccagtatgtagaagtggtttacggtttgggcaaatgggtgtatccacatcatctaaaggacaatattgaaacagccttttggcgacaacactatgatgaaacaggtttgtatttgctgacacaaaacgagttatcataattttaatcttaatacaatgaaatggagtgatctgatgagtaaattaacaacagcaactgtcttggcttttgaacgcaatttggatatttctgatggttttatggcacaaaaaaacagccaaaatgaaaacagtgggattgttcctgtgcgtattcaagaaaagtctatccgtggcacaatcagtaatcgtttaaaaaataccattacaaatgacccagctaagcttgatgctgaaattgaaaaagccaatttacaaaaagtagattcagcatctttattagaagataatgatactttgattgtgtcatggacatgcaaagtgctaccatttgacggcaagcctaatgtctgtaatgacccaaattatcaagccaaattattacaaacggtgcaaggctacctacaagagcatggcgtaaagacgctggcacatcgctatgcaaccaatatcgctaatgcccgctggctatggcgtaaccgtatcggttctgaaaaaattacggtcaatgtgacatgcaaactggcagatcagcagcagactttaacttttgacgccaaaagcatttctattcacaattttgatacacaaaacccagagcttatgactttggctaactggattgagcaaggcttaaccaatcaatcatttattattttaaatatcacagcagaagcggtggttggctatggtcaagaagtgtatccatcacaagaattgattttggatacgggcaaaactaagagcaaggttttgtatcatattaatgacaaagcaggcattcattctcaaaaaatcggcaatgccattcgtaccattgatacttggtatccagacgctcagtttccgattgcagttgagccatatgggcaggtaaccacaatgggtacggcattccgtcaacctaagcaaaagcaggatttttattccttatttgatggctggatattaaaagataacaagccaagcgtggaaaatcagcactatgtcatggcggtcttggttcgtggtggtgtttttggtgcaagtggaaaagaatcatgaaattttatcaagaaattaccttaattccccaagcggatatttccccacatgcggtgtggagtaagctctacacccagttacatcttgcctttgttgagcaaaaagatgagcaagataaaacgatttatggtgtatcattcccacaatatcgcaccattgctgataaaaaaattgcctatttgggctgtaagctgcgagtatttgcaccgactgagcaggcattatctgcccttaatttggataaacggcttgagcatttggcggactatatccatatcagcagtattcgctccgtgccagatgatatcaaaggatatgcaaattattatcgtgccattcccaaaatgacacttgatgagcgtatcacacatcaagccaaacggcatggcgtgccttatcataaagcggcagagcgttttgagaattataaagagcaatcattggtatacccccatatccaattaaccagcaaaagtaatcatcggtcttatcctttgcacattggtaaacaggcagcggaggttctcactgatggtagatttggcacttatggccttagtcgtacaagtagtgtgcctgagttttaatcatcagatgttaaggtttgtatggtagcttttatccaacgctttcaaagatttgttttgacacagtgatatcaaatcaatgattgagcaggttttggtaaatccttagccaatttgggtcaatatttgttataatcagttcaaccgaattttttacttaataagatgagggcaattatgcaaacctttaacccgaatgaccatatggttttttgtcgtaaatatcaacaaaatcttcccaaattacccaatccaccgtttcctaatgctaaaggtcaagaaatccaagataccatatctgccaaagcttggaatgcatggcttgagttacagaccatgctgattaatgaaaagcatctaagtatgattgacccacaagcaaaaaaatatctcaatgaacagcgtgagaagtttttggataatggcgattatgaaaaacctgcaggttataaaccactaaaagcttaataccgatgatcggtgataatcataaagcgatcattggatcgtggcacatcaaccaagattataaggagataatatgttgaaagttgcaagcatttttgagccgatattgacaggtgatgataggcctaagctgttgcatgactatcctgtcgttcatgtgcagccaattgcatggggcgatatggacggctttaatcatgtgaataatgtggcttattatcgctatgctgaatcggctcgtattgcctacatgcgtgcgattggttttatggcagcacgagaggatttattgacgattttagcaagttcatccatacagtatcgccgtcctgtaacctatcctgatacgctactaatcggcgtgcgtattaagcacctcggtagcaccagtgttgtccaagaatatgcaatgtacagtcaagcccaacaagcgctggttgcaagcggtgaagcggtcattgtccgcacggatatgaacatggtcaagatgccgtggtcagatgaggagcgtgctttgattgaacggtttgagaaccgtcgttttgattaattgatgctaagctttggcatttggcataaaatatggctgtttaaaaatcagagtgtgggtaagctttttaagtaaaggcttgtttgatcatttgccatcaaacaagtctttattgtcaaaccacagattgggccattttgatacaaacatggatgaaatcatcaaatgttatcttatttatacatatgttatcaataaattgttatcaagggcaggtatatccaagtttaagtgatcaaaaacacttaaaacaatctacttttgacatttaaatgtcaatttaagctttggtaaaaaacttgattgttattgattggctaaggttggcttagtgcatccagcagtcgtccgtgaatattttcaaagtcaccattagacatgatgatgatcgcatcgcctgctttggcatatgtttttatatgctcaatgatggcattgatactgtctagcacacgctgattgggcgtagaaccaatggcttctttgagaccccaagtcagtccttgtggctcataccaaataacctgatctgcgatggctgctgatgctgccaaatgtggtcgatgactgccaagtttcattgtatttgagcgtggttcaataattgcccaaatacgccgaggagctaggcgttttttagcaccatcaagtgtggtgctgatggcggttgggtgatgtgcaaaatcatcaaataccaaaatatcatcgacatcaccaatcaactccatacgccgcttaataccaccaaaatgcgacagggcagtacacgccatttcaaccgacacaccgacatgatgtgccgcagcgatggcggtcaatgcattattgacattgtgtagaccgctcattgaccagcgaaccatggctgatgtgttgttgtgatgtacccaaaatgatgaaccgtcgttggcatctagtttggcttgccactcggcatcgccatttaggcttgtacgcaccacggtcgtccaaacgcctttatctaatgttgtctctaggcttggggtgtctgcaggtatgatgatttgacctttagatggtatcatacgaatcatatgatgaaattgggtctggatggcatcaagatctgcaaaaatatcagcatgatcgtattctagattatttaaaatggctgtcgttggccgataatgtacaaattttgagcgtttgtcaaaaaatgctgaatcatattcatcggcttcaatgacaaaaaattgcttgcctaaatatgagctgtgctgaaacgccaagcttaggcgtctatcatctgtattgacaagcggcacgccaccaattaaaaatcctgtatcaatgcctgagaattgtaaaatccatgccaacatggttgttgttgtggttttgccatgtgtacctgcaaccgctaagacatggcgatccttgagcactgtttcgtataaaaactgcgggcctgaagtgtagggcaaccgttcatttaacatatattcaatggctggcatacctcgcttacatgcattacccacgacgattaaattaggcgtaggtatcaagtgttctgcgtgataaccctcccaaacctccacgccagcatcagcaagctgcgtactcatcggcgggtaaatattggcatctgagccagtcactgtatgacccaaatcacgagccagcagagccaacgaacccataaaagtaccacaaatacctaaaatatgaatgtgcatgataatccttagcggtaatgtttttatgataccaaagtcttaggtaggctttggtggcatcctaaagcctaatatttaataaatgctgtatttatcggttgttacttaatattttctttaaaatgatcacctgaatcaaagcgatgatcatgaataaaatcatggcttgtgcaggaattgatagccccatcaatgtccagtcaatcatgccgcaatcaccattgcctgttagtacggttgtgagtacctttgacatgggcatggtctgcacccaatactcaagccctggaccacaggcaggtggctgggctgatggggcatagtgaatccaagtatgacgagctgccaccccaaacccccaaagcgtgcctaccatactaccaacccaaagtattaaacgcaccagtttctggcgtgggttgatgatggcagcaagcaaggcgaatatacccatgatccaaagcccaatacgctgaaaaatgcacaaagggcatgggtctagcattaagtaattttgtaaataaccaatagcataaacactgcctgccaccatgatgagtgacaagataatattgagtgtgcgatagtttggcatcgtcatgataagctcttttgggtgagtgaatggtgaaaaataatcctataaaagcccatatatgttttatgatgaaccatcaggcctaccaaccctttcatgttttatgcttcagcggtaggcttttagatagtcataaaatcctatcgtatcagtagcttccagctgggcttgttcaatcaaggaggtgcgtgcaagctcatcaaactcagcctcatcaacacgacttagtgtatgggataacagttcggtttggtgcttttgagccagtaatttacctaacgcccaggtgccacccacacggtgtgaatcggcaatgatttgtgctgataaggtaaaatctggattgattgctttgccttgcatcattgtcaaggcagtgcggtactggttactgccatgatgtgcatcaaacgcatcggcgatggtctgcatttgggttaagtgatggataatccaatcatgtagattttctttaccaaaatcagtatcaatggcgatgcctgcttgtctgccatgattgacgacaatatcaatattttgatttaggcgtttttcttcttctggcatgagataaggcgagtcggtaaataagcaatacaatgccagaatctccaaaaaacacgccgttacgcttgtaatcccaatatcagaataagggtcaaggtcaatggcacgaaattctacataagcgattcctcgtgcttgcagtgcttgcgtgggtgtctcagaagctgtggcagtttgtttcgggcggatggggctgtaatattcgttttcaatttgtagaatgtggttgttaatctgaatgggtacgccatgagcgtcgtccacgccgatggcttcaaaatcagcataaggcgttccaatggctgcttgcaggcctttaatatattcgtccaaatgattatagcgaatatccaaatcctcttgggcgctattggtataaccaagcttacccatacgcaggcttgtaccgtttggctgatggtagctacaagttgtaccaagtggtatcaaattatgctggcgaccgctcacaaaagtaccgcataccgcagggcttgcaccaagcaaatatagtaccaaaggtgtcaggcgcttaaaattgcgaatcaatgccaagtatttatcatttttaaaggcggttaaatcctttgcaccctcggcatgttgccatacaccaaataaatcatcgccgacggataaattataatgcaagcctgcaatcgtttgcattttacggccatagcgtaccccaagccctgagcggtacagcgttttgagtttaccgatatttgacgagccatagtccgccaatggaatatcactgtcggtatcagaggtcatacaaggcatggataacggccacatcagttcatcattttctaaactgcgatgcactaaaacatgcaaatcacgcagcatatcaagtgcttgtttaattgatggcatgggcttggtaatcagctcaagcaggttttcagaataatcggtcgtgatataaggatgtgtcagcttagagccaagtttggcaggatgaaaggtcttggcagaatagccgtcaggctgcattcttaagccttctttttcgataccacgctgcatccctgcaacaagactgggtttaaaccaaaaagggagtgtaaaggtagatgtcatggcagatacttgattgatgatgaggtgccaaattaaaagcacgatgagtatattataagtccaagcgtctttgttggcaaaattatttgtacaaagcttacagtcgtgccaccaaaaagatggcacagtgactgatcgctgtcaagtgactagatagaaaatgatgagccacaaccgcaagtcgtggtcgcacttgggttattgacaataaagcgagagccttctaagccttcggtgtagtcaatggttgagccgaccaaatattgatagcttaaagaatccacgaccaaaatctctgaaccattatcaaaagtggtatcatcatcgcccaattcttcggcaaaatcaaacccatagctaaaccccgaacagccgccgcccgtcacatagacacgcaacattaaggcgtcattgccttcggtatgtttgagcttggcgagcttggcagcggctttatttgtgagggtaagacctgtattcatatgaaccttatcaagtaaaaagagtgtctatttaaataagaccaactgatgattatacaaggttttaagggtaaaaataaaccttaattgataaattctgtcaaagttgttgagtggtcaaagcccgtggttggtcaaattatgatttatagcccatcccactcagcatgattaaaattaatcactttgggtcttttgggacgctcaggcgactgctgcaatgcccgactgcgatgtaccaaaaaatcaagcaaatgattgcggattttgtaatattgatgatggtgatggatactatcacgatgacgtggtttgggaatggtattttcaacaatttctgccaaaaatgcccgtggaccattgctcatcaaaaaaatgcgatcagcaagtaaaatcgcctcatcaatgtcatgagtaatcataaataccgtctgatgggtgtctgcaacaatattgacaagctcatcttggatgacgccacgggtgagtgcatcaagcgccccaaaaggctcatccatcagcaaaagttcaggttttgtcgcaaaagcgcgcgcaatgcccacacgctgcttcataccgcctgataattggcttggttttttgtctttgactttggcaagtccaaccatgcccaaataaaagtcgatttgacggtttgtctcggcgactgataaatttggggttttggctttaagtgcaaaaccgatgttcttaccgaccgtaagccaaggcagtagtgcatgactttggaacaccacaccacgctcaagtgaaggttgggtgactggcttatcatacatcaaaatctcgccaaagcttgctacctcaagccctgctagggcatttaagatggtggatttaccgcagcctgaatgaccgataaggcagatgaattcgtttttttggatattaaaattcacattttcaaaaatattttcgccatcaccgtagcgtttggtgagtgcattaacctgaatgagtggtgaagcggtttgattattcaacataactcacctttttttgtaatattgcaaacaacatatccaaaatcatgcccataagaccaatgagcagcaccgcaaaaatcacattggcaagtgataaattattccactgattccacacaaaatagccaattcctgtgccaccgacaagcatctcggctgccacaatcacaagccaagcaatccccatagaaatccgcatgcctgttacgatggtgggagctgcggcagggatgacaattttggtggcggtctttagtgggctaagctcaagcgtcttggcgacattacgccactctcggcgtactgatgccacaccaaaggctgtattggtaagcattggccaaatagaacaaataaaaatcacaaaaatgcttgatgcgttagagtctttaatcgtataaagcgcaatcggcatccacgccaatggtgagatgggctttaagatctgaacaaaaggcgtggcagcactgccaagcacaggtgacataccaatggcataacccaaaggaatcgctacaatcatcgccaagaaaaatccaagcaacacccgcccaatggagtaaccaagctgtatgccaatgcctttatcattcaatcccttgtcataaaatgggtcagagatatgcacccatgcagtcttagcaaactctgttgggcttggaaattcgcttttttggatagcgacaatcgccccaggcttggtaaattcaggtatatcacccatcaaaatacgatactctagacgcaaaggatcggtgggtgcggtgatttgtttgggtagggtagcggtgtgccaaatgccaatcacactcaagacaatgagcagtgataatagatagcctttggctttggtcgataaagatttatgtgccatgtaatctccctgtggatttgtgtccgatggcaaatgagtccaaatatgcatcaggatcggtagcattaaattgcttacccatcacggtaatttttggctcatcgtctttgaccgtgtagcccatggcttgcatttgttttttggcatccgtgagcataaatacctgatttgcgatatcttgataattgatgttgcctgttatatagccccaccgcttcatctgagtcatcatccaagctgctactgagtgccacggcatcacatcaaatcccatgcgatcaggcacatcttggatggtgtccacaccatcagcaaaacgccccatgatagattggcgtagcaccagttcaggttgattaagataattggcaggtgagagcagtttggataagtctttacgaatacttggtttatttgccatcacattggctttaatgatggcacgatacatcgccaaaaaagtttggggataatcattaatgaagctttgagatgtcccaaacgagcagcatgggtgaccattccaaatatctcgacttagggtatggatatagcccgccttatcccaaaccgcacgctgattgaacggctcaggaccaaaaaacccatcaatattacctgctttgagattggcgatcatatcaggtggcgtcgttaaacgcagtttgacatctttatcaggatctagcccatgctcggctaaaaagtagcgtagcagataattatgaatactgtgctcaaacggaatggcaaaagtcatacctttccagtttttgggattgcggttatttttatgcttaagcgccataacgagtgcttgaccgttcgtgttttgtatggcggcaactttcatattctgcttggctgagccaagtccaagattgatggcaattggcatcggtgccaaaaaatgtgcagcgtccagctctcggttcatcatctggtctctgaccaacgcccagcctgcccgttttaataaattggctttgatgccttgttctgcataataaccaagcggatctgccataatgagcggtgttgcgcataaaatgggtaaaaagccaatatccaccgactttttttcaggcttaagcgtgtcaatggcggcagcctcttggagcgttgcgatgggcaaaacactggcaatcgctgctaaagcggttgtcttaccgacagttttaaaaaacgcacgacgggtcggctcatctggaaataaagctttgattgccaccgcttcaataaaatcagtattggtatgctcaatacggctgtgatcagagacgccttcaaagcgattatccaaagataacttgtcatcacactcgctttggctgcgatggttaccacagcggcaaccaaaattaagcggcttgtcagtatcgtcggggcgaaaaatatttgacatgataaaatatcaacttataagacaatcaagcaatataccgtttttgatgattctttggcggtgggtgtgcttgatctgatgtttaattggcttggggcgatgttttcatttcaattttggcggtgatgacgccgtcgctactttgggtgagtatcagcttgtcatcggtattttcttgtacttgccagtctttggcttgttcgatttcaccagtcgccgaaatgatgatggatttggtttttaggcgtattaaaggcgatttgtgttgatagcctgcgtgtgccatatcgctgatgtgatgtgcgatggcggcagcttgttcacgcaagggtgcgacaaatcggcacggcttatcatcaatggcgatacagtcgccgatggcatagatggcagggtgagaagtttgtagcgtctttgggttgaccacgataccgcagcgaatgtaatcaatgcccgcccctttggcaagtcgattatctaatataagacctgtacttgcgataatctcatcggcatagagtgttttatcattataaataatcacatagccgccatcttggggtttgatgtctgtgatatgagcattgccaatataatcaataccaattcctgtcagagcatcacgcaggcgttcaccaccaatggtaggtaaaatctccgccatcggtaggttgtcacggttgatcagtgtgacttgatgacctgctttggcgatatcttcggcaatctctgtaccgatcatgcctgcaccgatgatggtgatatgttgattgggtttggcgatgagttttgcttggagcttggcaaacatatcaatgtgattgacacgccatacatattcagcaggcaggctcggcggcagcattggggtcgcccctgtcgctagaattaatttttgatagctaaaattaccacgcgtggtacgcacgatacgctcattagtatcaatacttagtacaaatgtttgggcaaccaaagtcacatttaaagcttgtgctaagtcgacagcttttttggtgatgagtgtttcgggtgttttattttggctgatggcgatggagagctgcggcttcatataacgatcgcccaaatcgcttgtgattaaggtgatgggtaagttttcatttagctttcttaacgcttcgatggctgtccatcctgccgtgccgccaccgatgacgatgacgccagtcttactatggtgaccaattaagggggtgaccacttcatctcggctgacaaatggctcaaaatctcgcttggtaacaccgcacaaaggacactcccaatcttcaggaatgtcctcaaaacgcgtgccagcaggcaatccgccatcaggatcgcccaatttttcatcataaatccagccgcatgcacgacataaaaattgcttccaagcaccacgaccatcggtagggttaccgtttgagtccatgtttggtttggctgaatttgaaagtgtatcgctcattttggagatttctcagtcagtagttggtgggataagtagcgtaaatgcttgatggcaggcgtgacaattgccacgaagtgcgcttcacgaatacgcctttgtgggttagcactcatcagatagccttttgcaccttgatgcagtagtgatgcttgggtggcttgcagtgacagctcagcgccttggatgcgagtgtctagcacttctaagaaaaagtctttgtgtgtttcaaaaggtgttttggcaagcaccaaagtacgctcaatcaaagcatcaagctgggtttgtagtgcacctgcttggtcttctaagaattgattgacatgcccaagctgaacttctaccgcagtgatgtcatgaattgccccttggataatgccagcaccgatacccaattgcatgagtacaaacgccccacgcacacgctcaatgaagggcttggcagggtcagcgattaagctatcatcaggaacaaagtaatcagttaaggtgatttgccaagtgcttgaaccttccataccgctaaatgttgggcaagggtttagctgccagttgtctttgcgcgcttcatcaaatgataataagaaaaaaatgtctttatcaatctgaccaccgtgctcgacgctagcgattgcaccgcaatattgattgggtgcaatgtggcttatccacggtagcgtgcctgacaccacatagccaccattgacacgctgtgcgcgtagaatcatcgattcaatattagcaaaggttttcatgggattggacagtgctgtccccccaaagctttcacccaatgcgtggcggtgtaggatgtcggattttaaggtgtgattgtctgactggtcaagatacaaagcacagacctgatgacaccatgacaaaaaccctgtcgtaccgcaagtttcagagatttttgctgtcgcaaggatggcattaccaaagcggccaccttgtgctgacagatgtaccgaaaaagcccccagttttgccaattgactcatctcagcggtggggtaataacctttatcgatggcgatggggtcaagtaactgttttgaggctgttgcaatattatccagtaaaccgctgtcttgccaaggcccaattggctcaatggcagcattgataagagcttggctatcatgataaaaagtgtgcaagtgattcatgtctttctcaaacgataaaatgaccaaaaatgagtaaatgattagattgtaatcacaaagttgatcattttcttattctaaattagaataaatataagtcaaaatcatacataggcagcaaagtcatgcagtagggtggctggcaggatttttttgcttgtatgtccaaaaaattgcttcaggcgaatacctgaagcaatgaatttttagcgattcatcaaaacagcgaagctgatacagtaaagctgattaactcttagggtgcaaatgcttgtagctcagggttgatgtcagtttgggcgacattattggcgtagttgcataaagttgccaatgccacacccatgaccacatctaggatattttgatcgttatagccaactgccttaacagcagcaagctcatcatcagaaaccttaccacggcggtcaattagctgcatggtaaattgtgctagggcttgatatttttcattatcttcgatggcggtgcgaccacgcaaagcgtttagcacattttcaggcatctgaagtttggtgccagctttggtgtgacctgccacacaaaaatcacagccattatgagcagcagcggtaatttgtactacctcaatttcttcggcggttaggctgttacggctgttcattttgcccaattcttgatacatctcaagtgcttggggtgaatttgccaaaacaccgataagatttgggataaagccattggctttttgaaccatgctaacgcgttctttggctttgtctggggcagattcggcggtatgtacagttaagcgtgccatatttttccttgtttattttaaagttatcataaaatcgttcatcatcataaaaacacaatcaaagatattgatttcaatgaaaaccaaacagcatatgataaaaaccattattctgattatgcgtgatgataatattaatataggtactctgagtaatttttacaagagtaattagcaaaatatgctaaaatgattgaaattttatatgatgaattgtgatgatagcatttaaaaatgttgcggtgcgtcgagaagggcgactgttattcagcgatgttaattttcagctgcacaagggtcaaaaaattggcttgacgggcaataatggcacaggaaaatccacactgttcgccaccattttgggtacgcataatacagatgttggcagtattagtttgcctgagtcatggcagattgctcatatggcacaagaggtcagcgcaacagcgatgagtgcgatagactatgtgctgtcaggcgatgaagaatggtggcagctcaattggcaaatcaaccatcaaaccagcttaactgatggtcaaattgcaccaatgtatcagcgttttgaggaaattgatggctatcgtacacctgccaaagcggcgatgattttgtcaggacttggctttggtgaagctgaccacagcaagcaagtatccatgttctcagggggttggcgtatgaggcttaatttggctcggacactgatgcaccgagctgatgtgttattacttgatgaaccaaccaaccatctggatttggatgccattttttggcttgaagaatggttattaaaattcgagggattgattttattaatcagccatgaccaagcttttttagatacagtgtgcggacatattttgcacatcgagcaaggacaaatcacactgtatacgggtaattatagccaatttattcgtacacgagctgaaaggcttgctcaagaacaacaggcctttgaaaagcaacaagccgtgcgcgctcatcttgaggattatattcgtaggtttcgtgccaaagccaccaaggccaaacaagcccaaagccgcattaagcagcttgaccgtatgacacagctgtcgcctgtgatggcagaaaatggctttagttttcgtttttatgaaccgcaacacatggcatcaccgctgatttatttggataatgccaccattggctatgatggtataccaatgctaacaaagatcaatctacgcatcaccccagatgcacgattggggattttgggtgccaacggtgcgggtaaatccacactcatcaaagcattggtgggcgagttgccactcattgatggtatctacaaagtctctgaaacattacagcttggctattttaatcagcatcagatggatagtctagatgacgatgccacacccatgataatgctaaggcgtctgtcaggtcagacatctgatgccaatttgcgtgcctttttgggtggttttgggtttcaaggtgaacgcatcgatacccaaagccgcttattttcagggggtgagcgtgccagattaatgctggcattgcttgtttggcaaagacctaatgtgctgatacttgatgaaccaaccaaccatctggatctacagatgcgaaatgcacttatgttggcattgcaagattttgctggggcattgattttggtatcgcacgatcgagatttgattatgtcggtgtgtgatgagctattgttggtctttgatggtcgtgctactgagtttgtgggggatatggcggactatgctgagcatctacgccaagccaaaaaagcgcatcaagccaatcaaaaaatggacaaatccattcatcaacaatctacaaatacggcaactggtcaagagatatgcttgcatgacagcctaagtaaagaagataggcgtaagaaaaatgcccaaatccgtgaacaaacagcaccgctaagaaagcaaatcgctaagcttgaggatcggcttggtaaactgagcgatacattggcgatcttagaaaatgagttgtctgatgctcgtctgtacgaagatgattataagtcagaattattggacaaactcaatcatcaaaacacactaaaatcacaaattgatgacatcgaagagcagcttttgacggcgatggctgagcttgaggcactagaagaggcattgtcaggataagatcatcatgaaaattgtgtatcgccaagattattatcgcttacttggcgtggctgatgatgccgatactgccactattaagcgtgcttatcgccaacacatcgcgcgtcatcaccctgaccgtcaggcaaactcagatgaggatgtggtgcatcagctaaatactgcctatgccatcttaaaagatgacaaagtacgccgtcagtacgacaggcaactgccacgcattcgccaaaagcagtggttatggcagcagcgtgccaaattttatgaggtcaagcaggggtttggttatgttgccaatacagctttggtgaatttgggtaagcaacaatttaatcgcctcatcgttgatgcgcatcataccaaacacatggcacaaataacgcagcgagcagccgtgcaccttgggcgtatctggcagcgatttactgatgtatctgctaagcttggctatgatacaagctgcacgatcggtttgcatacggtatacgaaggtggcgagatattaattcattggcagggcaaacgctttaaggtggtcttgccagcggggcttagtcatggtgacatcatcaccgtgcagtgtcatgggtcgcctgtgcgtcttagaatccaaaccaagcctgtgaatatttatgttaaaggtctggatatcaattatgtgatttttttaagtcctaatcaagcagcaaatggcgatactgttgtgctaccaaagcccattggtctgacgcttacgattccaccaaatggcaaatatccgacaaaaattatgctatcaaaccaaggacttcggcaaatggcaagtgtaggagatgtgattgtgcatctaaatatcacctaaaactttttgctgtatgatggcataatttattactattaattaatcattattgaactaataatttatatattctgtaggtattttatgactgtacaattttcaaaaactgattttttaccaccgctttggcttagaaatgcacacttgcagaccattttaccacgctatatcgccaaaaacacgcctgattaccatcgcacgctacttaaagactcactggcacaaagtgatgttgcgtttgattatgtgatggctgatgatcaaaaaggggctgatggcaggtataccacacccattgtggtgctgtttcatggtatggaaggctcaagccaaagtcattatgcacgcacattggcaagtcatatctctaccaaagggtggcattttgtggtggcgcattttcgctcttgtggtggtgtggcggtatcgggcaaggtgttttataatgctggagatgcggctgaattggcacattatttgcaagttttacaacagcaatttaccacaatttatgccatcggtgtatcgcttggcggtaatgccttggcaaaatatatgggtgagtatggctcggatgccattgcaaatcgtgccgtggttgtctctgcacctgtggatttggcaagtgcatctattgccatggaacgcctgcttggtcggtatatctacacgccttatctactcaatcccattatcaaaaaagcgttagataatcggctaagtagcgaggagatcgcagcgcttaagtctgccaagcgtatggctgattttgataatgcattcaccgcaccgcgtcatggttttcgctcaaaaaatgactactatcggcaagcttctgcattaccttatctacgccacattcaaaggccaaccttaatcattaccgccaaagatgatccgtttttgggcgtaacagcagagcctaccgatgtatcgtcagatgtgctactactggatactcgctatggtggacatatcggctttgttgattatgattatcaaaaaagacagtttgatttggggtttataccacgcactgcacttgatttttttggttttttataaggaatgatgagattgtgatacataagaccaaaattcttggtcttatgttttattatgaactatttcagctctaatacatcttgcatatcatacaaacctgcaggctgctgggctgcccataatgcagctcttagtgcacctgtggcaaaagttgcacgattttgagctttgtgagtaatttggataatctcaccatccatcataaattcaacggtatgctcacccacaatctcaccaccacgcaacgcatgaataccaatatctcctcgttggcgtttggcagcaccttttcgaccatagatggcagcattggttatattttgtcctcgtgcttcggtaatggcttgtgccatcattaatgcggtgcctgagggtgcatcgattttatgtttatgatgatgctcaatgatttcaacatcagcatccaaacccagcacacgggcagtcgtcgcaagcaggtttagagataaattaacaccagttgaatagttgcctgcatagacaatggcaatgtgtttggcggcatcttgaagcttggcttcttggtcatcactaagacctgtcacgcccatcacgagcggaattttgtgcgtaacgcactggttgagtgcttcatcgaaggcttcaggtaagctaaaatcaatcatcacatcaacttgagagccgtcaagtgttgagagtgcaacacctgattttttaccgccgatgaattcgccagcatccacgccgatcaagcttgatgtgctgcgtacataagccccgccaagctcggtgtttgggtggttcattgtcgattcgatgagcatacgacccatgcgtcctgatgcgcccataatgccaattttaagcttattcataacgatgtccttgtttggatggtaattacttgattatagcaaggttattttgatttttcatcataatttaagctgcctaatgctgttttgatgtcatcgatcaaatccttgggtgattcaagcccaatacaaaaccgtaccacatagcggccgcacagatgtgcctgtggtaaagtacgcattttgcttaggtcatacagcatgaccaagcttgttgcactgccccagctaaagcccaatttaaatatctgaagcgtatcacaaaaacggcaaatatccgtccaagaataacgcttatcaaagaccacgctcacaaggcccgctgatcgtccatttggacagttttgttgccaaaattggtgacctaaagtatcaggattggcagggtggagtacttgagcaaaagcaggctcatgttttaggtatgtcaaaagctcgatggcatttttgctttgtttgtcgtagcgcagggctaagcttggcaggctacgataaactcgtgcgcaatcatcacctgagacgctaaagcctaagagtgtatgcatgcgtcgtagctttgtatgtaaggtttcatcatttgtcacgatgctccccatcagcacatcaccgccaccgctgggatatttggttaatgcatgcacacaaatatccacagatacaccatttagatcaaatggcgaataagccagtcctgcaccccaagtactgtctagggcaacgcaaacatgatgttttttggcaatgttgattagtccttgtaagtcaggaaattcaagcgttacagatcctgctgcctcaagccataacagcttacaggcagccgttggctgaaagcttgtcgcatccagtgggttgtatattttaatcaccacgccgtagcgtttttgtagttcgtatagatgctcaagatttgggctgtacatattttcagttacccacacctcatcaccttgtccaagcagtgcagtattgactaacacgatggcagcaaggccactgggtgtcaaaagtgcatatttgccgccctcaagccttgctatttgatcagccagcagataagttgtcggtgtgccatgcgtgccgtagctataatcataacgatcacgccagtgtctttgaaatagtgccttggtgttgtcaaagatgatcgttgatgcatggtatacaggtggctgtaggctatttatttgcatggggacttgacgggggtcgcaaatgagctgggtgtgtttgtccatggataaatccttatcaattaacgcgtggttttgtcgtcattcatacggctaaaaatcattgctaagatgggtccagaaatattatgccaaacactaaaaatcgcacttggcaccgcaatcaatggattcatcttaaagtgtacagcagccaacgctgcacccaatcctgaattttgcatacccacttcaatggcgaccgctttgctgtcgtgtagcggcagcctgaagatttgggcagcagcatagcccaccaaatagccaaatccattatgaagtgcgacaacaaaaaagataaacaaaccagattcaatgatgcgatctttacttactgccacgactgctgagacaatgagtatgatggcaatgacagaaattaaaggcatggtttgactaactttttggactttttgcttaaataatgagcggatgataagaccgatgaatactggcaaaagtaccatttttagcacagagacaaacataccacctgcatcgacttgtagccattggctggcaaataaataaaatacagctggcgtcaaaataggggctaagagtgtggagagtgtcgtgcaagcaactgataaagcggtattgcctttggcaagaaaagtgatgacatttgacgaggtgccgccagggcagcagccgactaagatgacaccgatagccaaatcaggtggtagcctaaatgcttgaaccaacaaaaaggcaatgactggcatcacaacatattgaaggataacgccaataatcaccgccttggggtttttggtgacttcaccaaaatctttgaaagtcaaggttaaacccatgccaagcatgacgatgccaagcagatagggaatccatggcacaagctgcttgaatgcatcaggaaactgtgtggcaatcagtgcaaagaccaccacccaaacggcaaatgttttactgacaaagttggtaaatttcaataagccatccatcaaacatgctccaagttttatagtttatatacaaaaagtttgttttaaatattttttgaataataaatgttatgaattaagttgtcaaatttggcttatcaaatatcatgcataaaaaagccccgaataatcggagctttgattgatgcgtgatttgggtatcagtcaaacaaatctttgacatcatctttgattttatcaaaaaatccctttttcttaggctcactactgttttcggtgctaagcgtcccttgtaattgacgcaacaaatctttttgttcactggtcaaattgacaggggtttggacaagaatgcgacaaattaaatcaccttgcatacgcccttgaacggtcgtaacgcctttacctcgtacacgcaaaagtttgccagattgcgtaccttcagcgactttaattttaactttgccatctaaggttgggatttcgatttcatcacctaacgccgctgaaatcattgagattgggatatccatgtgtaaatcagccccatttcgggtaaaaatttcatggggtttaacacgaacctcaacatacaaatcaccacttggcatcccttggtcgcctgcctcacccttaccagctaagcgtacacggtcgccatcatcaacgccagcaggtatagagacctcaagtgtttgttgctgaactgttttgccctgaccatgacaatctggacaagggtttttaatttgtttgcctgtaccatgacaatcgggacaggtttgttgcatgacaaaaaacccttgttgcatccgaacctgaccttgaccatggcaggtgctacaagtaacgacatcgctatctttaaccgcacctttaccatggcaggtgtgacaagaaacgctggtttgatagctgatttgttttttacagcccttgaccgcttcttcaagcgtgagtgttatgttgtataataagttagcaccttggcgagcttgttgctgggatctaccaccgccaaaccctccaaatccaccaccaccaaaggcttgcccaaagatatcgccaaagatgtcattaaaatcaccaccgctaaagcccccgccaaaaccaccagagcccatgccttgttcataagcactatgtcccatgcggtcataggttgcgcgtttttcaggatcactgagcgtttcataggctttggatgcttctttgagcttttcttcggcttcaggattatcagggttgcgatcagggtggtatttcatcgcaattttacgaaatgcttttttaatctctttttcatcagccgtgcgatcgacacccagaatgctataaaagtctttactcatgtcaaaatccataaaaagtacaaaaatatgcctcaatatggagttgatgcccccatttatcaagccatgaactcaaaaaaagtaataaaatcaatggtcatttgttgggtatttaactgatgatggctaatactaaaaaccaagtgtttcatgtgaaacacttggttttttagtaaatctctgtgccaaaaagatgaataaaacttttggttcaatcagcttggcaccgttggccaagcaagcttagcgaaggtttaaaaattggtaaatttcatggttggataaatcacctgtaaattctctgccttgggcatcaaaaaccgctggcgtacccatgatggcaagtggcattacctgtttttggatggcagatagtggatttgggttgtgttggcattgggcttggctatttgggataatacctttcattgcagcagatagcagggcagcacgcttggcgttgtctgtcgtacaccaaatatgattcataggcagtcgtgattcatcataaatgggatagccgataattttgatggtaacaccttgaagattcagctcatcgatgcgttcgtgtaggattttacaataagggcaattgatatcacttgcaatataaagtactgatttttcacgagtttttgaaggataaatgaccaaatctttatcagataattcccctaaaatatggcgatttttggccgcttcaaataccaagccatattctgaaaattgtgcatttttgatgctggccatcgcaccatccatcagataacgcccatcactgctgattaaaaaggtggtgtcgccttgtcctgaaatgccccacagcacgccttggatgccagtatgataaaaaacagcctctgtcatatcatgcatggcactcatattttttaataaggcggtacggtgttctggtgtgatgggcgtaccgatgggaagagcggtctgagtggcggcatcgatgggcgtggcagggcttgggttggcactgggtttaccttgaatgatgtaatctaaatcttcactgatcagtaaatgattgccatctgccaaagtaatttgccacagtttaggcacagcactttgggtcaccttaacgacaggtgtggcaagccctgcactggcaagccgtgtctgaatttgcgtggtgtgtgtctctgggctattggctaaagcaagcgtgctaaaagatgacacaaatagcatgattgccaatgtgccacgaaaaatcatcttcatcatagtacagaccaacttaaaattgattaatctcatctggcgttaaaaagcggcattcacccatctgaagcccttcaagtgaaatatgaccaatgctggcacggtgcagcttgataactttattaccaaagtatgccatcatgcgtttgacttgatgatatttaccctcggtaagtgtcagcacagcatgcgtctcatcaataaaagacaagacagctgggcgggttttttctgtttcgccttctaataaaatgccgttggcaatttgtttgatggcatatgcttgagcatctttatccatcgcatcagcaagtgttaattggtactgtttgggctgatggcgtttggggctggtcacacgatgcaaccacgcaccatcatctgacaatagcagtgcgcctgtcgtatcaacatccaaccgccctgcgatacgcagattggccacctcaggtaccgcaattaagtcagttaccatggggtattctttaggctttaaggtgcattcaaaaccatcaggcttatacagcaaaatatatcgattgccatcagcaaccgatagtgcttcacctgcccaaagtatctcatcatttgccaaatcaacatgatgacttgagtctttgatgatggtgccattgacagtaatttcaccagcatgaagaacttttttggcatctttgcgtgacagttctgtggctttgcttaaaaatttatccaaacgcatatatggtctcattcattccaggtatttgaactgtgtgggtttaatttgcctgattttagcactttgggagggttatctttgtcgttttgatgttggctaagaattcgccaaaatgacaaaagggcaaaatatgggaaaatggcgtatcattgtatggaagataggttgtgacttaccaaactttaagtaagccgtgtgaggcaatatacgaaatcaaaaaaagcgaatttttggcttttgcttatcccattagtactcgtgagcaggcaatgagccatgtacaaaatttgcgtacccgctatctagatgcccgccatcattgttatggctatattatcggaaatccgcacaataccaccagtgcaggttttgatgatgatggcgaacccaatggcacagcaggcagaccgattttaagcgtcttacaacataaggcaattggtaattgtattatcattgtcgtgcgttattttggcggtattaaacttggtgctggtggtctgacccgagcctatgcagcagcagctcagatggcggtagataagatggtattaaaagcatttatcgcttatcagattgtcaagttaaaaataagttttgcacatgaagcacaagtgcgttatttgattcatcaagtcggtggtcgtattttgaaggttgactataaaacggatgtgcgtatgacgattgaagttgagcaaaaagttctagagacttttgtagagagcttgggcgtttatgcaatcgttgagcaaacttagatgagcataaacaccaatcacaaaaaaccacaagttttggcttgtggtctttttgtacgcaatcattgcatatttccctatggttatccttgtaacagccatgctatcctagcgttggtacttacctgtacctattatcctttgctgttgggctatattatgcccaaatttattaggttaaaatagtggcaaatgtcatcaatgtttgtaagatattgcttacaaaattggtatgggttttaatcatttaaaaactttatgatttggcagagtttggtatggttattttaatcaattttcatcaaaattacagataataggcttgatttatccattttcatcagtgaaatggggtgaaaaatctaaccaactattgccttttgtgatgaattcatgaataatgaaagcgtaaagaaaattaaaaatttgttttataccaacgctgggggttaccatgcaaaatcttgatgcttacaaacaagacttattagcactcaaaaaagaatatcaatcaagaattgataaaatcagcgatcatatctcaaaccccaaagaccagctccagcagcactgggatgatcaagcagttgctgccagtcgtgatgaaatgcgtaaggcattattgattgaggccgagcaaggactgacacaggtcaatggtgcattacgccgtattgagcaaggagaatacggcagctgtgttgaatgtggtgaactgattaacgaaaaccgcctaaaaactgtgccttatacgccttattgtattcatcatgcgtcttaatgatgcgtcagggcatctcaccaagcaaactgtatttacctaagataaaagatgcaccattgacaatttttgagtatgtgtgcaaaaaatttcatcatatcggtacagcagtttggcaaaagcgatttaatgatggactggtcaaagatattgatggcagggtgcttgacttaaatagcccctatcagcatggtatgaccatcacttactatcgccatctttgcgatgaggttgttgtaccgtttgagcatcacatcatttatgaagaccaaacactgctggtggtggataaaccgcattttttgacggtatcaccagcaggtggctatgtgcaacaaacactactaacacgcctaaaacaaaccacaggcaatccccatctttcacccgcacatcgcttggataaacagacggctgggctgatgatttttaccaagacttgtgaatcacgccgtgcttatcaatcactgtttaacgacagacaaatcaataaaatttatcacgccatcgcaccgatgactcaggcacatcaattccctttacaagtctcactgctcttggtgcgaggtgagccgttttataccatggcggttggtatcggcgagcctaatacacatactgatattgatatcttagcggtcagtgaagatggcaaatgggcaaaatatgagctaaaaccaacaacgggcaagctgcatcagctcagagtgcacctaaattatttgggcatacccatcgcccacgatagtttttatccaaaagtgatgcatcgtgctaaggatgattttgataaaccattacagcttttggctaagcacttatcattcaccgaccctattaccaacaaacccatggcatttgaatctggttttgagctggatttttctaaagtttgataagcttttgggctttgataaagaatatgcctacagcaaaacaaaaatttgttacatccacttaaaaacatacttaccattttcttaagtacagtcataaaaaggcaaatcaggtattacttactcggattgcatttaatctgatttatgtcaataaggataataaattatctgttaaacgcagtaaaacataagaagtttatcaataaaaacaacataaactggtgagatatttattaagagataaacttttttgtaacaaatacaaaccagtgacttgactggtcttttagttttggtttatgttatatcttttatggtttgggtgggcagatacatggacatcagtaaaaaagacagaatagctttggtcatcacgattcttttaattgtgtttggtgttataagtgaggaattcatttttgttgtacttttctttattctcatttattggggagtacggattattaaaaataacatctcttttattaactttgatagacgagacagggctgaagaaatgcctgactcactggctaatgaattggctaagctggcttatcttagacaaacaggtgttattactgaagatgagtttttattctgtaaaagtaagctgttagaccagtaagaattaatcaaagcacgatgaatagattcttgtcattttaggagtgattatgcgttcaattgtagatgcttatttgcgtctgggtttggtgccactgattgtgttggcactggtgattgggacgataattggggtggttgccccatcttttggcttaagtttgggtattttgggctcaatttttgtaggtgcacttaaggcagttgcaccaatactggtgtttgtgttggtattggcagcggtttcaaatcagcgtatcggtgcagacagtcgtattaaaccgattatttttctttatttggtgggtacattttcggcagcattggtcgctgtaggtgcaagttttatgttcccaacagaactggtcttaaataatatcgaaagcattgagcaagctgcaccccaaagcttgcgtgaagttttaaccaatcttgtgatgaatttggttgccaaccctgtggcatcattggccaatgccaattatatggggattttgacttgggcggtgctgattggtcttgcgcttcgccatgtcacagagaccactttgcacgtggtgtcagatttgggtatggcggtaaccagtgtggttaaatggattattgcgttggcaccgtttgggattttgggtctggtggcgtcaactgtggcagaaactggtattcaagcactggtgggctatgcacgattattggcggtactggtcggctcgatgctgtttattgctttggtgataaatcccatcatcgttgcggtgatgacacgcaaaaatccttatcctttagtattcacctgcttgcgtgagtctggtgtgacggcattttttacacgctcatcagcagcgaatatccctgtaaatatgaaccttgcacgcaaattgggtctaagcgaagatacttattcggtaagtattcctttgggttcggcgattaatatggcgggtgctgcgattaccattaatattttaaccttagcggcagcacacactttagggattgaggttagctttggtgcagcggtactgttggcgattgtcggcagtttgtcagcgtgtggcgcttctggcgtggcgggcggatcgcttttattgattcctttggcgtgtaatttatttaacattccaaatgatatcgccatgcaagtggttgctatcggctttatcatcggcgtggtacaagactctgccgaaacggcacttaattcatcgactgatgtgctatttacagcagcggcagatccaaaatacgcccattatggctaatgatatcaatacttaaaatgccttgctgatgcaaggtattttttgctcgttattaattttgcttgttattaagtagtgtcatgcacagtttacgccaaatccatcaattcacgatcccaaacttgccaacagtcatcatctttggcatttttttcctcaaatatcagctcaatcttactgtgatctcgggcggtggtgtctgtgatattgatactctcgggggtaatattgattaaaagccagccttctaaagtatgcacaacccccttgatgcgtaaataattcggacgagataacagccacttttgtagatgataactatcaaattgccatgtgctaggcagtcgccacccacccacttgatgtgctgctcgtcgctcatgataccgataaggtaaatcatttaactccttggcagttttgtcggtggcttgagttatcattgagtttgacgctgtcaaacgaatccgccaagtcgtcttttgagcgttatgtggcgtggttaataatatttcagcaatttcttggtttaaaggtgcctcatcgatgatgacagcatgctcattgatgcttttgatccacgctcttaaagcctgccgttcatgatctgtgagtgtatcatggcgattgatggcaacaatatcagcgtgacgcacatgggcaatatagccatcatgagtgcgatatttttcttgttgccactgaggtgcgctgagtacacagatgacggcattgagcgtaagcgtggtttgccaatgtggttcagacagctgatctaacagctcattggggtgtgcaagccctgtcggctcaataattaggcgatcaggatgatgctcattaatgagcctgacaagtgcaacttgcaagggcagttgacctgtgcaacagatgcaaccgccattaacttctttgatggcgatgtcatcatcggtcacaagcgcactgtctataccaatttgaccaaattcattcagcagtagtgcccatctttggtgggatttatgagtaattagggcgttgatgagcgtggttttgccagcaccaagaaagcctgtaacaagcgtggttggaatttgatgaatcggtctcatggttattttgacttatcaatgaaataaagatgggacgaaactgtcccattatggcatatgtgctaatcagccttcagcaccatctggcacaaatacatagcccacgccccaaaccgtctggatatagcgagcttgagaaggattgtcttcgatcaatctgcgtaggcgagatacctgaacatcaatagaacgctccatcgcaccccactcacgaccacgcgcaagattcatgagcttatcacgagtcaaaggctctcttgggtgctgaaccaaagcttttaaaacactaaactcaccagtagttaaggtaacgacattaccatctcgtttgagagtgcgtgtggataaatccagtgtccaaggtccaaactctaccacttctacttgttggcttggggcgcctggcagttctctattttggcgacgcaataccgctttgatacgtgcaagcagctcttttgggttaaacggttttggcaaatagtcatcagcacctgcttcaagtcctgcaatgcgatccgcatcagagcctttggcggtgagcatgataatgggaatgcttgaattttctgcacgcagacgcttacaaattgcgatgccatcttcgtcagggagcattaaatctaaaacaatcaaagaaaacatctcacgcgcgatgagtttatccatctgcttaccatcatgtgcaacacgcaccacataaccatcatcttccaaaaagcgttgcaacagtgttcgtagccgagcatcgtcatctaccaccaaaatacggtgcgtcatcgtatctaatatgtctgtcatatcatcttccttatcatcatataccgactgtatcaagtcgactcaatagtcttagtgtacaatattgcacagtaaaatgtcactagttttgtgttaattttctttgagatttggtcaaaactgcctgaaagttttgatggtattttaaaggatattttaaaggctgtcggcagactttgaacgctgggctttggtgttttgagtgaaagttggtataatgggtaaacatttcctgccaatcggcgcaattaaaagaatccttatgaccaacacaacgactgataccgacattcaaatcgaccatcaagccatttatgccaaacttgctgcaacgcatgccatcaaaagcactcaggttgaagcatttgctagactttatgatgaaggggcaagcgttccttttattgctcgctatcgcaaagagcatactggcggcctagatgatgagattttgcgtgaacttgaaaaatcactcatcattgagcgagatttggcagcacgccgccaaaaaatcctaggtttgttggccgctcaaaatgtcatgacggatgagcttgctgaacgggtgaataccgcctcaaccaagcttgagcttgaagagatttatcagccttatcgtccacgccgtcgctctgtggctgcacgtgcaaaattggcaggacttgaaccaattgcacatgctgttttggcaggtcaaagcccagcagaagcacttgagggctatgtatcacctgagacgctgaccgatgataaaggcgaaactttcgaggctgattttggtgattttgataaacaaatcgtcggcattcaggcgattattttggatgaatgggcgacagcattggacttattggacaaggtacgcactggatttaatgccacggcaagcattcgctctgaattaatcggtgaagaaaagcgtgaagtgggcgaaaaattcaaagactattttgagcataccgaaccatttgccaagctatcaaatcaccgcctgcttgctatgttgcgtgggcgtcaacaaaatgtattggtgttacatgttgatggtgaagatgaaccatttattgagatgatcatgcgtcattttgagattgacccaaaagctgctaatggtgaatttttgaccgagaccgccaaaaaactttggctggttaagtggcgttcacagattgagcaccgcctcttaaccgagcgtcgcttggcagcagaggcggatgccatcgctgtttttgcagagaatctcaagcatctacttatggttgctccaacgggtcgtaaggcgattttgggggtggatccgggctatagtcatggcgtcaagatggcggtgattgatggcatgggtgaggtgttggcaactgatacggtctatccttttaagccgcaccataaactggccgaagccaaagatcgcattgagacgctgattaagacgcatcaggttgaattggtcgctattggtaatggtactgccagccgagaaagtgaagagctggtgaaatcaatcattcgtgaagcttctttatctactcaggcattggtggtctcagaggcgggtgcatcggtttattcagccagcgagatcgcctcccaagagttgcctgatttggatgtatcggtgcgtggtgctgtgtcgattgcacgccgcttacaagatccgttatcagaattggtcaaggttgagccaaaagcgatcggcgtcggtcagtatcagcacgatgtcaatcaaactgagcttgaaagcagtttagacaaggtaaccgaagactgtgtcaatgcggtgggggtagatgtcaataccgcaagccctgcaattttagctcatatctcagggcttaataaaaatgttgcccaacaaattgttgagtatcgtcgtgcacatggtgcttttactaaccgtgaagcactaaaaaatgtaccacgcttgggcgtcaaaacttttgagcaagcagcagggtttttgcgtatcaaagagggtgatgaaccactggacgctactggtgtccaccctgaaagctacggattggtatatgaaattttaactcagcatggtaaatcactagatgaggtgttgggcaatgagagcttgaccaaagcgcttaatgacagctcggataattttagccaattggcaacagttttaaatgagcttgccaaacctgcacatgaccctcgtggagagtttcgtactgccaagtttcgtgatgatgttaatgaaatcaaagacttaaaagtaggtatgacccttgagggtgtcgtgaccaatgtgaccgcttttggctgttttgtcgatgttggcgtgcatcaagatggcttagtgcatatctcagagctatcagatggttttgtgaccaaccctgctgatgttgttaagcctcaagatattgttacagttcgggttatttcggtggatgaagtgcgtgggcgtattggctttagtatgaaatctgaaaaatctgccaaagctaatcagtcagccaaggcggataaagcagacaaatcggcaaatcataagcccaaagcagatcgcaaacctgctcgccaagacaaaccaaaatctaccgccaaacctgccaaaacgatgggcagctttggtgcgctgttacagcaggcaggattgggtaaataattcgctcatctgacttgccaagcccatcaagcgtgattgcttgatgggttttttgtttgattattggctgataccacgactgccgagccactgtttcatcagtgcaatctctgggttttgggcgtcgatgatgtcttgggcaagcttacgcatggcggcatctttgccgtattttagctcgatctgtgccatctgtatcgccccttggtgatgcggaatcatcccttgggcaaaggcgatgtcagcatcttcgtgatgtacccctgtcatcatcgcatcatgtatactcatgtcgctaagataggctttggcgtgctcgctattggcatcgatggcatctttatcttgggcggtggtcagccaattttgcataaattcaatctcggtttgttgtgtatcgatgatgtcttgggcaagcttacgcatggcggcatctttgccgtattttagctcgatctgtgccatctgtatcgccccttggtgatgcgggatcatcccttcaacgaaagcgacatcggcatgagctttggtggcagctgccatcatcgcatcgtgcatggtgttcatcgactgcatgtactcgctggtgtgtgcagccatcggcatgctggtatcgtgatgggcgtgtgctgcgtgctgcgtctcttgtgcattttgtgtgcttagtgcagctgtttgctcagtgccagcggtgggctgactacaagcactcaaggcagtagcaaaagcgatggcaagcagaggtttgttgatgatcatgtcaggctccttggtggtgattgatcgtattattataaacccatgcttttgggtaggaccagtatttgtgtgtaacactttcttgctaggatttacactctggcgatttggtcagtatggtgctagggatgatgatatctataacacaaaaaatttccccaagcgatcacttggggaaatttttatagtaaatccgtatgaagcggattatttacgtttgtccacaggtacgaactcacgatgcgtctcgccagtgtaacgctggcgtggacgaccgattttaaaagactctgagtgcatttctgtccagtgagcaatccagccagcagtacgtgccaaggcaaagattacggtaaacattgaggttgggataccgatggcttttaggatgatgccagagtagaagtcaacatttggatagagtttacgctcaacaaaatacggatcttctagggcgattttttcaagtttcatcgcaagctcgagtttaggatcattgatgcccaaagcgcccaaaacctcatcacatgtctctttcatgactttggcgcgtggatcaaagttgcgatagacacgatgaccaaagcccattaatttgacttctttacgcttaactttttccataaattcttcgacatgttcaacagagccgatttcatcaagcatctcaagaacagcttcgttagcaccgccatgcgatggtccccaaagtgctacgatacccgctgcgatacatgcgtatgggttggcacctgttgagcctgccaagcgtacggtagaagtggatgcgttttgttcgtggtcagcgtgtagggtaaagattttatccatcgctttgacaagcacaggattgactttataatctggctcacctggtgtggcaaacatcatatacaagaagttttcagcatagctaaaatctttgcgtggatacatgaatggctcgccgattgagtatttatagctcatcgcagcaagggttggtacttttgcaatcaaatccacggcagtattgtcacgatgctcagcatcggagatatccaaatggttgtgatagaacgctgacagtgcgcccaccacgccaaccatgattgccattgggtgagcatcacggcggaaaccctcaaagaatttacgcaactgatcgtgtacagacatatgatcagagatgcgttgataaaatgcttgtttttgttcggcgttgggcaaatcgccgtataataacgcataacaaacttctaaatactcagccttggatgctaagtcgtcaatggcatagccacgatgtaaaagctcgcctttttcaccatcaataaaagtgatggcagattctactggtgcagtcgccataaagccaggatcataagtccataaacctgctttggcaacagcactaatgtccagtactggacgacctaaagtgctctccagcacgggcatgtcgtattcggtaccgtcaacggtaagagtaactttctttgacataattgacctcatctatggttaaaatcatctgaaaaccttgtattgtacatgacaacagtcaccatacttccttgtgggtgctagcaccatataagatacaaatacaatcagatgaataatttcacacaaattggctaagccattagcccaaatcgtgtggcgtccttgttttgttatatattcatatctgcatgtaggcacgatcaatagtgaaccttttggataatacaaaattggataatacaaaaactttgataaagttacaagactttttcgtatcaagaacaaaattagtgaacattcacccactggctcaacttggattttaggggcaatttgcttacttggcaagcaattttcaaagcctgacactgtttgtaacaattaattcacgcatttgtgaggtattttttggaaaaatttcggaaattttgcacaaagtttgggattttgtttgtaattattgagtaagcgttttataatttaggtcatttatgttcgcatttttctaaacgataatcaatcgtagttatcagaaaattaagcttctaccaatcaattttaatgataagtcgttgttgataagtacacattgactctataataagaccatgaaattttgatggtttggtgattggttatcgtgataagattgtgcatttttttgtggtgcgcgctgaaactcatgacctgtgatgagttgtgagaattgattgggcggtattttttgcgtatttacctatgtatctactgcccgattgataagccagccagctactccttgccatttttcggcgtaaattagataaggatgcccgctgtgaaaagcaaccgaccgattaacctaccattaagccaagtgattgcggtgaactcaaaatcaccgattgctatggcttctattttgcatcgtgtgtcaggcattgtgctgtttttgcttgtgcctgtcatgttgtgtattcttcaaacttcattatcatcagctgatagttttgctgctgtatttaacaatatcgccctgcgttttgtggcatggatttttgtggcggcaaccgcttaccattttgttatgggtatcaagcatttgcttgctgatgctggcatgaatgaagagcttaaatctgggcgtactgctgcggtgattagttttgtaattgcggctgtactgattgtcgcatcgtttgtatgggtgatgttctaatgagaaataattctggtattaaaagtgcgactggcttgacaggttcaggttcacgagattggattttacagcgtattagtgcggttgtcttagcagtttatagcgttgttatggtaggctttttcctattcaatgatgtgaattttgaaagctggcaaggctttatgctaagtctaccaatgaagctatttagcttggtggcgattttatcattggtatttcacgcatgggtgggcatgtggacggttttgacggattatgtcaaatcatcaggtttgcgtttggtcatccaatctttggtcattatcgctgttttggtctatctgttttggggcgtgatgattttttggtaattaaccaaagcttcaacatacgaataccaaatgcaatatgcaatcattaggaattaacatggcaacaaaccaagataacacaattaataatatcccaacgctaaactttgatgccgtcatcgttggcggtggcggttcaggcatgcgtgcgtcattgcaattagtcaatggtggtatgaaagtcgctgtcattaccaaagttttccccactcgctcacataccgttgcagcccaaggtggtatcggtgcatctttgggtaatatgagtcctgataactggcattttcatttttatgataccgtcaaaggctctgactggttaggtgaccaagatgccattgaatatatgtgccgtgaagcacctaaggtcgtttatgagctagaacacatgggcatgccctttgaccgtaacgcagatggtacgatttaccagcgtccatttggtggtcacagctcaaattatggcgaaaaacctgtgcctcgtgcgtgtgctgccgccgaccgtacaggtcatgcgcttttgcataccttataccaaaaaaatcttgaaaaaggcacacagttttttgtggagtggattgcgctcgacttgattaaagatgatgaaggtaatattaatggcgtgatcgccctagaccaagaaacaggtaatatttcggttttccaagccaataccacagtattagcaacaggtggtgcaggtcgtatctttaaagcatcaaccaatgcttatattaatacaggagatggcttgggcatggcggtgcgtgctggcattcctttgcaggacatggaattttggcaatttcacccaacaggtgtggcaggagctggcgtcctattgaccgaaggttgtcgtggtgagggtgcaattttacgcaataagcatggcgaagcattcatggagcgttatgccccaactctaaaagatttggcccctcgtgatttcgtctctcgctctatggaccaagagattaaagagggtcgtggttgtggtcccaatggtgattacattgtcatggacatgacgcacttaggtgctgctacgctgatgaagcgcttgccgtcagtgtttgagattagcaaaaactttggtaatgtggatattaccaaagaacctgtgcctgttgtgccgactatccattatatgatgggtggtattccaaccaacattcacggtcaggttactgtaccaaacctagaaggtcctgttgatgagcagggtctatataccgaaggccgtattgttaaaggtctttatgccattggtgagtgtgcgtgcgtatctgttcatggtgccaaccgcttgggtactaactcactgcttgatttggtggtgtttggtcgtgcagcaggtcagcacatcattgatgaatttaaccaaacggggcgtaattataagccgcttaatccacgggtgctagattttacccagtctcgtcttgataagctacaaaactctaccgaaggctacaatgcccaagaggttgctgatgagattcgtaataccatgcagtctcatgctggcgtgtttcgtactcaggcactgatggatgaaggtgtacaaaaaatcatggcacttgccccaaaagttgagcaaatccatttggcagataaatcagctgtctttaataccgcccgtattgaggcacttgaggtagcaaacttatatgaagttgcaaaagcaacgatgatttctgcgtctctgcgtcacgaatgtcgtggtgcacatatggtggttgattatgagcatccagcagattatgagccagcaccacttggccgtaatgatagcgaatggatgaagcacacactttggtattcagagggtaataaagttgtgtataagccagttcgtaagcagccattgacggttgattattgtgtgccgcgtgttcggactttctaatcaccctaagccaaatatcggagggttggcgtgacgccaatcctatccaaattattactggagaaaaatcatgagtcgaggcacccgtatcgtagagatttatcgctatgacccagacaaagataatgccccttatatgcagtcatataccgttgaattactagattcagaccgtatgttgcttgatgttttacttcgcctaaagcgtgaagatgaaaccttaactttccgccgctcgtgccgtgagggtatttgtggctctgatggtatgaatatcaatggcaaaaatggtttggcatgcttgattaatatgaatactttgccaaacaaaatcaccatccgacctttaccagggttgcctgtgattaaagatttggttgtggatatgaaccaattttatgaacagtatgaaaaagttcatccatatttaattaataaccagcctgcaccgcctaaagagcgattgcaatcaccagaagagcgtgaaaaaatgaacggtctttacgagtgtatcttgtgtgcgtgctgttcaacggcttgcccatcattttggtggaatcctgataaattcttaggcccatctgcattattaaatggctatcgttttattattgatagtcgtgataccgacacccaagctcgtttggctcgcttagatgacccatttagcttattccgttgccgtggtattatgaactgtgtcagcgtttgccccaaggggttaaacccaaccaaagccatcggtcatattcgtaatatgcttttagatcaagcaggataatcaaactttaagcatattttaaatctataaaaagccgtatcgctgggtgcggctttttatattggtatcactaagatcgccatatcagggcatgcgtatctttgatagtattttgataaaatgaaataaatcttaataatgttatccattgttgcatataacaccaaaaattagccttggtgatcgtaagtttatactcaagtaaaagtatctacgcttttttggctttataaggataattgtattttagggtaattatcacccttgttatctttatccaaatggcgtacactatgcatacctatgtgtcagttttgatacagattgacagccatggttgtcaagagcatggcacatcaacttttttaataaaatggcgaaaaacgaatgacaaacagtagtaaagatacggtggcctttgcaaacaccgaattggcagcagacagtgcagcctatgtcgaagcactgtatgaacaatatatggcagacagccaaagtgtgagcaaagagtggcaagattattttgctacttatcgtcaagatgatgatgcaccacacaatgcaatcaaagagcagtttttattgttggcacgcaaccaatcaggattgaccgcaaaatcaagcgactcatctgtcgagcatcatcctaaacaaatggcggtgcaggcattaatttctgcctatcgtcgccgtggtcatcgcaaggcaaatcttgatccattggggctacatccgcgtccagaggttgaggatttgactttggcatttcatgggttggcggagtcagatttggacaccacatttccaaccaatgatttggcgattgggaaatcagaagctaaattgcgtgaaattatcgaaatcttagagcgtgtgtattgccaaagcattggttatgaatatatgcatgtttttcaagcggctgaaaagcgttggattgaaaattatatcgagtcaaatcacggtcatatcaaatttgacaaagataaaaaattagaaattctagagcgtctaacagcggctgaaggtttggagaaatacttagctcgtaaatatacaggtgtcaagcgttttggcctagaaggtggcgaaagcttcattcctgcagtgcatgagatggtacaacgcacaggtgctcatggctcaaaagaggttgtcattggtatggcacaccgtggccgtttgaatcttttggtcaatattttgggcaaaaaaccaagcgatttgtttgatgaatttgatggtaaagtgcagcctgttaatggttcaggggatgtaaaatatcacaatggtttttcatctaatgtcatgacaccaggcggtgagatgcacttggcattggcatttaacccatcacaccttgagattgtctctcccgtgcttcaaggttcggtaagagcacgccaagcacgccgttctgaaaaatatggcttacaaattgataacagtacggttttgcctttggtggtgcatggagatgccgcactggcaggtcagggtgttaaccaagagactttccaaatgtctcaaacacgcgcctataagactggcggtacggttcatattgtcatcaataaccaagttggctttaccacttctcgtattgaagacgctcgctcgacagagtattgtactgatgttgccaaaatggttcatgcaccgattttgcatgtcaatggcgatgaccctgaagcggtcgtatttgcctctcaattggctgtggattaccgccgtgaatttggcaaagatgttatgctagatattttctgttatcgccgtaatggtcataacgaatctgacgagccatctgcgacacagcctttgatgtatgcagtcatcaaaaaactaccgaccacgcgtgcccaatatgttgagcaattggttcaagagggcatcatcactcatgagcagggtgccaagcttgaagatgactatcgtgaactattggatcgtggtgagtttgttgcaggcggtttggtcagcgagccaaatactgaactgttcgttgattggaagccttatttaggtcacgatttgcaagacgactgggaaacgggcgtcgatatcgaaaagctcaaatcctatggtcgtgcgatggcaaaaatccctgaagggtttaccctgcagcgtcaagtggcgaaagtcgttgagcagcgtttggcgatgcaaactggtgaagaacctcttaactggggcgctgctgagactttggcatatgctagccttgctgctgaaggttcattggtgcgtattacaggcgaggatgtcggtcgtggcacattctcacatcgtcattcagaactgtataatatgaatgatggcagtatgtatattcctctgcaacatatcaccaaagaccaagcacgctttgccacttataattcactgctatcagaagaggcggtattggcttttgaatatggctatgccaccacagtgccgaatgcattgattatttgggaagcacagtttggcgactttgtgaacggtgcacaggtggtgatcgatcagtttatttcatctggcgaaaccaaatggcagcgtgtttgtggtttgacgatgcttttacctcatggttttgagggtcaaggtcctgagcattcatcagcgcgtctggagcgtttcttgcagctgtgtgctgaggataatatgcaggtcattacgccaacaacgccagcacagattttccatgccttacgccgtcaggtagtacgcccaatccgcaaaccattgattgtgatgtcgcctaagagcttgcttagacatccacttgcaacctctaatttagaagaattggcatcgggcaaatttgaaactgtcttgcctgaaattgattcaatcaatcatgagcaggtgacacgcttggtactttgtggcggtaaagtgtattatgatttgctcgatcagcgtcgcaaactgggtcaagagcatatcgccattgttcgtattgagcagctgtatccgttgcctgaagaacgcatcttggctgaaattgacaagtatccaaacttagaagaaatcatgtgggcacaagaagagccgctgaatcaaggtgcttggtattacttagcacctgagctattccgtatggtagtacctgcaccaacgaaggcaaaaatcattacaccttcggcgcgtcctgccgctgctgcacctgcgacaggctcaccaaaactgcacaccgaacaacaaaaagctttgattgctggggccttgggtgtgacagtggaagccttgaagtaacattcattagccaaagtgccgtgtgcgttttggctaataacatttagtatttaaaataacatattttgatttataaacttgaaggagtttattatggctgaaattaaagcccctgtatttccagaatcagtacaagatggtacgatcgttgaatggcatgttgctgaaggtgaagccgttagccgtgaccaacttttggctgaagttgagactgataaagtagttttggagattgttgcgcctgacaatggtgtgattaccagtatcgttaagaatgtggatgataccgtattatcggcagaagtggttgcaatttttgaggcgggtgcgtcagcaccagcaggtgaagcaccatcaaaagatggtgagctgtcaaaagacgaagctgataaaggcacaaccattgatccagcatcggttgcagcaccagtacaaccaaaagatgaatcagcaacatcagaagctgaatataaagatcacagcccagcagtcagaaaagccgccaaagaaactggtgttaatcctgctgatgttcaaggctcagggcgtggcggtcgggtgaccaaatctgacatgattaacccaaccctaaaaggtgataatggtcaagtgattgccacagctgttggtcagcgtatcgaaaagcgtgagccgatgactcgtctgcgtaagcgtatcgctgaacgactattgtcagccactcaagaaactgcgatgttgacgacatttaatgaagttaatatgaagccgttgatggatttgcgtgccaaatacaaagatcgttttgagaagcgtcatggcgttaaacttggctttatgtcattatttgttaaggctgccaccgaagccttgaagcgtttcccagcagtgaatgcatcgattgatggtagcgatatcatttatcatggctattatgatgtgggtgtggcggtatcaagtgatcgtggcttggttgtgccagtgctgcgtgatactgatcgcatgagtatggcagatgttgaggcgggcattcgtgattatgcaactaaggcgcgtgatggtaaactgagcattgaggagatgactggcggtacatttaccattaccaatggcggtgtgtttggttcattgttatcaacaccaatcatcaacccaccacaaactgcaattttgggcatgcatgcaatcaatgagcgtccaatggcagttgatggcgaagttgttatcctaccgatgatgtatcttgcgttatcttatgatcaccgtttgattgatggcaaagaagcagttcaattcctagtgacaattaaggagttgattgaagatccatcaatgctactacttgacctataaggtttgacagatggtttttgcaaaggattgttggaggcgttctgacaattctttgtgtgtttttaacatagagaaaaaaagagaatatgatgaaaaattcttatgatttagttgtaattggtggcggtcctggtggctatgaagcagcgattcgtggggcacagctgggctttagtgttgcttgtatcgaaaagcgtgtacataaaggcgaacctgctcttggtggtacttgcctaaatgtgggctgtatcccatcaaaagccttacttgacagttcgcatcgctttgaggcgaccaagcatgaattgactgaccacggtatcacaacaggtgatgttaatattgacattgccaagatgcttgagcgtaaagacagcattgtcaaggggctaacccaaggcgtggcaggtcttttgaagggtaatggcgttgactggttacaaggctggggtacattggtcgatggtaaaggtgctgaaaaacaagtaaaatttacaccacttgagggcgatgaaagtatcattactgccaaatatgtgattctagcggcaggctctgtcccaattgagattcctgttgccaaaactgatggcgagtatatcgttgactcaacaggtgcgttggaatttgctgaggttccgaagcgtttgggtgtgattggtgctggtgtgattgggcttgagcttggctcggtttggcgtcgtttgggtgcagaggttgtgatttatgaagccatgccagaatttttggcagtcgctgacaaagacatctcaaaagaagcagcgaagctacttaaaaaacaaggccttgatatccgtgttgataccaaagtgacaggtgctgaggtaaaagatggtcaagtgatcgtaaccactgatgttaaaggtgaaactcaaacagatacctttgataagctcattgtgtgcgtaggtcgtcgtgcttatagtgaaaagctgttggcagaaaattgtggcattgagcttaccgagcgtggtttggtagcggttgatgaccaatgtaaaaccaacctagatggcgtttatgctatcggtgatttggttcgtggtccgatgcttgcccacaaagcgatggaagagggcatgatggctgttgaacgcattcatggcgaaaaagcccaagtcaactatgacaccatcatcagtgtgatttatacccatcctgagattgcgtgggtaggtctgtctgagcaagctgccaccgaacaaggttatgaagtgaaaacaggctcatttagcttatctgccaatggtcgtgcattagcacaaggtgagggcgttggcttgattaaagtggtggctgatgccaaaactgaccgtttattgggtatgcatgctgtatcagttggcgcaggtgatattgtccaccaaggcatgattgccatggaatttgtttctagtatcgaagatctgcagctgatgacttttgctcatccgacggtttctgaggcggtacatgaagctgcgttatcggcagatggcagagccattcatgccattcaacgcaaaaagcgtaagtaatcttaagatagcttagctttgattggacaaacaccccaaaatattttggggtgtttttatttggggtaaataatcacttggataaaaaatgattgatgatagctcgtttgattaactttggcgatgatttgctaaaatcaccgcttctgtatttacaaaggctgaaactcaatctgtctagataaggttttaattatagtttacttgatatattcaaactctactttaccatcaggcgtaaataagcacttagcggtataaggtagctcagccccaaaatcattcttagcggtaaatttagtcgtaacaatgacattaccatgggtttttgatttttgaacacttgtgtctaatagtttaaaatcaacgctatctggatatttagcatctcgttttaccatttctcggcattttctcggcattctgataatgcaactttatcagatattgcttgctcggactgagatttaagctctttatttaaatctttatctgatacaaaaaatctttcaccattagcacaatccacaaaaacaacaatttcttgttttggaatactttttgcgtctgatagagctataaaactaatgctatcacacgcattatcagaattggcaattttatcagccgctgccctttcgtgtgcttctagtctttcaatccaatcactgccccatttttggtatactttggggtagttttctttgtcgtattctgtaaaagcgtgttcagatatgggcttactaacgacaggctttgctttaggcccgttgttagcctttgcttcagcttttggcccagtctcttgcttagtcttttgattggttgcttgctgaggggcttgctcggttttctgctcgtctgtttgctcaacttctttcttggtttcttgttcaggcgtttcaatgatggtggcaagtaccaccataataccaaaaaatacagcaaatataataccaaggcgttttaagaactttttcataacacaccttactgacatgcttttttggatgcactgattgagccatctttacagacgaattttccaccgctgcagtggctaattccgccctttttgccgctacaagtagtatttttgccatcacaggcgtggacgatagggctaatgcagttgctacgacgcttaaaatagcaataaacttgatcataataattctctttttggttaatttctacttattataaacaagtttgtaagaattaggcaataattattacaaatatcaccattgataatatattattaaaaaaatttatagcttaacgctatttttacatacgcataaccaaatcttgtttttttattgcccaaaacttatttggtcaaatgtttgtgagtttgtgaacaatggtcaatgcttctcatctttatggcaaatagtcaataaaggtaaatatgatctcatttgcattggtagatggtaggattaatattaaagtgttctaatcagatgctcaagtatcttttcttattaaatcattgttattttttaaatatgctatataataatgtgctttatttaattatgttatatcataaccgagggtatcatgataaaaaaaccacttgtttgtgcgatatcggccacctttgcgatgccagcggtagcagataataccaagctgggtgaagagccaaccaccaccttaaagggtgtattggtaagctcgcaaacgaaccaaaatacaggttttgtatctaatgattcaaaacaatccagtgatcttacgctttcaaaagataaattaaaatatcgttcggcaaccttgggcaatgcgttaagtggtgagcttggtattcatagtaacccttttggtggcggttcatctgcacctgttgtgcgagggcaagagggtgtgcgtcttaagattttacaaaatggaactgatgtgattgatgtgtcatcaatatcgcctgatcatgttgtggcgaccgatacacttttagcgtctaaagttgagcttgttcgtggtgctgatacgctgttatatggcttggcatcgccagctggtgtgattaatgttgttgatgaccgtatcccgaatcgtatgcctagtggtgctatccatgacaaaatcgaaggcgagacgatgcttcgatataacacaaacaaccatgaaaagcttgcaactgcaggggtgagctttggggtaggagatcgcattgcggttcgggtggagggcttaaagcgagaggctgatgactatcaagttccccattttcaggcagatcgcatgttagattatgtgccaggtagtgcaaataactctaccgttggcatgattggcgtgtcttatattcatgataatgggcatatcggtgcttcttatagccaccgtaaagatcgttatggtatcccagggcatatccactgcgacagccaacgagagcattttatcaaatggcataatatcacaaaatccaattattatttacccatttatcctcatttgatggaggattcagatattgatgacaatcctcatacgcattgccgccacaaccacgaagaccatatcggtgagcataatcccacgggcgtgcccatcaatcatgaacatcattcgccttggattgatatgaaaaccaatcgctacgacattcgtggcgaggtatatcggcctattcaaggtttggataaaattaagctaagcttaacttatgcagattattatcatgatgaaaaagatgctggcaatgagcaagacccaaacaatcacaaaccttctgagcgtgatacaacggtggataagggtcatgccagctctatttttacaaaaaaaggcgttaatggtcgcttggagttatatcatacaccgaccaaacgcttatctggggtattgggtattgggtatcaaacccaaaaatctgcagcaggagaggcgtatttgccaagctattttcaatcagaagcagaatggcaaaaagcccaaagtcaaaacattaaccaatatcgtccttacttattagttccaaataccaataaaagccttggtatttttggacttgagcaactaaagctaaatcaaatgacttttaaggtggcgatgcgtcatgaaagacaaaaaacaccaattgaatatgaccagcatttacttgaccatgctttgcagtattttttaagtaaagcacagctaaaagcacctgatcatcctgatttgacgacatataaacaacatgccacctcttatgctggtagtgccttatgggatattacgccaaatcatcgattgtcattgacctactcacataacgaacgcattccatcgccgatggagctgtattatcaaggcggacatttggcgaccagctcttttgagcatggcaataaaaacttggtcaaagaaaaatcggataattatgagctgggttttatgcatacagcagataaagtcagctataaagcaagcacttactatagcaattttgataactatatttttaatgagaccattgccaaagaaggcaatttatacatcagacgctataatcagacgacggctaagttttatggtgtggagggttcattaacttaccagccaaatgccaatcacagtgtgatgttttttggtgatatggtgcaaggtaaaattggtgcattatctgatattaaaggtaagcttgtatatgctggcagaaagtgggtttattttgatgatgatatcaaggatatgaccgttgatgataatggtgattatgatgccgatggtggtttgacttgtgccttaaaaacgcctgaacaatggggacaaattaacgataataatgattgtagtacaaccattaatgtctataaaaacggtacaacaacctcaggcgaggaggattacgaccgtttggcacgaaatccaacttacgcacccagagtaccgcccagccgcttgggcattcgttggcaagggtattttggtgatcattggtctgccaatgcagaatttaaccatgtgtttgcacaaaataaagttgccacctcaacggttgccattaaacctcaattcaagcagccagaaggttgccaacgccatgagagtcattgccgaatcagcgactatggcagtgataacaaccctttgatgatgcagccaagatatatcacagaaaacaaaacggcaggatataatttgctcaatgttggcttagattataacaatgcatatcgtaatgttgattatacgctgtcaattcgtgcgaataatttacttaatgaacaaatctacattcacaactcatttttgccgtttgtaccgcagatggggcgtaatctgactttaggtttgacggctaaattttgatagtacatcgaccatagcttcaaatacatttgatatcaaggacgatatcaaatgtatttgaccaaagaagggcgttatcttgataaaagttgggcgaatggtgattggtcatcagatttggcagttggtgaatgcgtgtcatcataaaatggctgacatcttaggcgtctgaatgaaaccttaaataatcactgaaataatcacgccatgataactttataactttagtctattgcttttggattttttttcattataataacgacaagatataaaaaagataaaatatgaaacataagtttatataaggtaatattaccttacaatttgactggttttgtatctcttgtctgtctttatcctactacgccagctatcacagccaacaaaaagtaagtaaaaggagcaattacttatgaaaaaaacttccacacagcttgggctacttgccgtcagcgtttcgttgattatggcaagtttacctgcacatgctgtttatcttgaccgtaacttaagagatggtctgaaatttggtatcagtggttctgtcaatcccagccttagcgtcaattcaagcacttttacttatttgggtgactcatcagtatatggcaataatgccactttagagcgtatgctacaagaccaagacagacaagacagtgatgagcgagcaagactcaatggatttggtggtgcttctgtttatctgggtgcccaaaaatacctaactcgggatattactttatttggtaatgttggtttgtatgcaccagcaagcaaaggtcaaagagctgcatatggctatggcgtgaatcttgccaccaaatatggcagtatcggtattaatactgataatgaatttagtgctggtgctggtacgcccagcggaatttataatttggttgatggctcaaacgagtacagcactgccatatcggttagtaccagctatatccctaagtttaagtttagtgcataccatgcattgcctggctcacctgatacacggtcggtaagtagccacgaaaactactatatccaaaaagcacaaggtctttctgcatcttatagccatcctattagcccaaatcaaaccctgtctgttggcacggcttatagcaaaagccaaaggcacaaagatttttttagcgataccgcctataataacaaaacagcgtccactgtggggctaagttaccgccaaggagattggagtattagcggtaatgttggtcaagccaaagaaaatttacacggtgcgatcattgatgatattaccacaaaagcttttgggacaaaaattagctacaaagtaaccccaagaatttctgtttctgggacttatggacaaaaaaccaccgataaaaataccaagcccaacaaacgcttggatataccaaatatcatcgcacaacgaggaggtaatatttcaagccgtgtgcatgaaagttggttttttgataaaaccaaacaaaaaacctatggtctgagtgcaagttattatatctatggcggcatatcgatttctgcttcgatgaaccaaacacgcaccaccaactttaccgaagaaggtgcttatagtgagcgtaagaataacagctatcgcatttcaactggcttttcattttaatgaatttaagcatactttatcaaccacatcaatgatgataaacagctgctagccattcatcattggtcaataaacattcagggacataaggatattttatgaaaccatcaatcatcaaaaacccattaaagcttttgaccgccatgattttgttaaacgcaatgcctagccatgcgatttataatctgtataaaagcggtgattttagcttcgatgtgcatggtgagattaacacttatgggcaaaaaaatagccaaaaatatacctacctttatccagaaacaggctgggcaagtgttaacaatgactacgaagccatcaccaaaggtgcttatgagcaaagaagtgatcgccgtgtacgcttggggcaagatacaggtgcttcttggacggagtttcgtgcatctagaaaactaagagatggctggcgtgtcagtggggcaattggttttggttattatgatagcggtacaggtatgtacctaaatagtgctaatatggcatttgataaaaaagatttaggttctttatcattgggtcgtcaatatctgcacacaggctatgtcacacgcaccaatacctatacaccacttgaaacttttggggaaaatagcatccgcttggattatactgccattaaaggattgcatgccagtggctattatagcctgccagcttcaagcgatgttcgtaaaaagaagaatgggcaagaggtagagggttttggtgcgtctgttagctaccttcatccacttgatgatcatcaaacggtgcgtgttgcattgggctatagtgatagccgtcaaaacgcaaaaaccacaggtagagacagtaatttttatgctaccaagagccaaggtacggcagcttcggttgaatatcgcaacaataaactgctattggcggcagatattgggcaaaaaaatgaacaaatcaatggtactgttaccgataaatctaagggcaactacatgggcgttaaggtaggttatgaaatcacgcctcgcctaaccatgacggcaggctttggtaaaaaagttgctgaacgcacccaaaaaagcggtgcagcactgatacatgcctaccaaaaagacttgtgtgttgctgatgccaatgattcatgccataattttgttcaggcttatgaaacagcgttatttgataagattgattcaaaacgctcttatgtgcgtgccgattattatctaagagaaaatgtacgcctatacggccgtattgatgacgaaaaaattaccaatcagttgggtaataaagactttagcaagcttcacaatacaggctatcgtgctggcgtgtcattcattttctaagcagcttcttggctgaaaatatcataagttgtcaaacaaatttatcttaaaccgtatgattttataaatttagttacaatccatttgagatgagataagtttgttttttgacttagttaaatgaattgatggttaaactcaagcatcagctaattaaaatttaatagcatggcttggctgattacttttttgaccaagcatgctaactttgctctgttatggagtacggagacaataatgaaactcaataaactagccgctattatcagtgctggcatatcgtgtgcgtacctgacccaatgcacttctgttcatcaaatggcaacatttggcaccaaaaccatcgataatgaagcagctttacaagatactaagccgcccactaacggtgtttatacttatcctgtaacacgcattcatcaagacagtacggattattttttaagtggcgaatatggcagatcagctgaccatgtgcaatctgaaggtgagtttggcgactcttcagcataccctcgtcccgatgatggcgtcagtcgctactttggtgaaaaaattgttgataagtttcgttggcttgaaaatgtcgatgatatgaataaagactacacccaagaaactgatgaagatcgtgatcgcaatctgattggttcgttgcttgaagatgatgtgaaagatgggttgtttgataaccgcacacgcaaagatttacagacggttaagccaaaacaatcaagcgaggttaatgattgggtaaatgctcaaaatgaggtaaccaatcagtattttgatgccaacccaatctatgagcaagtcaaaaacaatattaacgctttgatgagctaccgctatagctaccgtaaagaaaataaagatggcgtaggcagtcttgaattataccgtcatgaagacggctatatccgccttgagttgacagacactgatggcaataagcgcaccttattcaatgaaagagagctttcagaagatggtaataccgttttgccgtggccagatatttatgtcagcgataaaggctcttatgttgcctatgtcaccgcccctggtaataatgatacagacacccgaggacgcacagatttacatgtcatcgatatcaaaacaggtaaagctgccattgagccgattcaaaatgctgacaataacagcattatttggctagatgataagagctttttgtacattcaaggctcacaaatcaaacgccatgaagttggtagcaaaaaatgggttgatcccattgaggtgacttggggtgagatcgatggtgcaggtccaacggatatgtggtacagcgatgatgaaaccagacggtatttagtcattgaagcatataaaaaagcaccgaccagcttcatcaaagacaccaaaaccaataaggtatatcgtattcacagcgaaaaattctttaatgactttttctatcacgcacctgattatactcacgcaccgttagcctctttggtacattttgatgataaaacgctggatgtttacttcatctcaggtgaaaaaaatatcaagggtgatattttcaaaatgaacctaaacaatcctaaaaagcgtgagattgtggttgctatccctgatgagtatgatgaaaccttagaggcgatttatcaccctgaagcaggcggtcattttttgattaaatatctaaaagatggcgcacacaagctgatattaaccgatacaacgggcaagattgttaaagatttgacacctgacataccaggtaatgcggacgatttaaccagctatgttgcagaagatgacaacaaggatggggataaaaaagcaaaagataaagaggtagccgatgaggatgatcaaacccctgatgaaagctatgtgtcttttcgctttaatgccatcattaagcctcgtacggtttataaatacagcccatcaaagggcgagtttattgatgtgcgtcgtcgagatttgattccttttgatgaaaatctttatgaaagtaaacaaatactttacacctcaaaagatggtaccaaagtaccgatgaatatcaattataaaaaagggattaaacttgatggtaaaaacccaaccgtattgtatggttatggtgggtttggggctactgaaaatcttgcctttcataaaagcaaagccgcttggcttgagcatggtggtgtgtgggcaactgcctttatccgtggtggcagtgaatatggccatacatggcataaggatggccgcctgctcaataaaatgaatgtctttgatgattttgcagctgcggctgattatttggcacaatcaggctatgctgatagcaatcatttggcaatctctggcgcgtcaaatggtgggctgttggtgggtgcttctatggtcttgcatcctgaaaaattccgtgtcgccataccagcggcaggcgtgcttgatatgttgcgttataacgataatttccatacccaatattgggcaggtgagtatggtttgccctatgacagtgttgcacaatacaagcttttaaaaagctattcgccttatcataatgtcaaggcaggtgtctgttatccatcaacattggtgatgacctccaagcgtgatgatagggtgacgccttcgcattcttataagtttgttgcagctttgcaagataagcaggtgtgtgctaacccaactttcttatatgcagctgagcagtttggtcactgggcaaatacttatcaagagcaaaaaaatgactacagtctgtttacaagttttgcactcaatgaaatgaatatcaaacatgtgccagacctaactcatcgccatgatgctgatttttataaaactgataaatggcgtgaagaagaggccaaagagcatgctaaacagattaaaaaactgcaacagcggattgataagctcaatgaaactaaggataaataatggcgtattaagtgttaaatatgcataaattcttatatcaaaaaaagatgctcaatcattgggcatcttttttgttgggtattaaacagatgcgtgcagtgggcataaaaattacctgccatgataataacgctcagaaaggcaagtttgatcttaaatgatcatagccacgcttggtattgtgaaatttatctaaacttcacaatgccaacgccatctgcttgggcggcgtgttcttggatggtggtaagctcatcaggtgtgggacgatgctcatgatgcccgcactcaatgcattcaatatattcatcatagtcaggctcaaagacttgaacttggacgatggtatctattttcttgcaagtggggcaaaccacaccagccaaaaactgccgctttgggcgattagattggtaacgcatgtgattatgcttgattaatcaagccacgatggcgtaacaacgcttcttgggtggctttgcgtccacgaaatgccacatagttatcttgggcatcacgagagctaccacgggctaaaatttcatcacgaaacgcacggcctgtggctggattaaagataccatcttcttcaaatttaccaaacgcatctgctgatagcacctctgcccaaatataagaataatatcctgaagcatagcctccagcaaaaatatgactaaagccgttaccaaaacgctgatatgaagctggcaagatgacggcaacctcatcacgcacagcatcagctaccgataagatgtctgcataagtgatttgaccgaagttaaccattttagcggtgtgcaaccgcaaatcaaacaaaccaagctccatttggcgtagcgtctgtaaaccagtttggaaatttttggtggcgataagtgcatcttttttatcatttggcagggcgtcacctgtttctacatggcggctaattattaggcgtagaccttcatcggtgatggcaaagttttccataaattggcttggtaactctacagcatcccattcaacgccactgatgcctgagacatcagccacatcgaccgttgttaatacatggtgcagtgcatgaccaaactcatggaacagcgtattggcctcgtcaaaggataataaactgggtttatcaccaatgggtggtgcaaagttaccaatcacaaagccaactggcaagcgtaactcatcaccgtaaacttgtcggctttggaagccatctagccaagcgccgccttgtttacctgctctggcaaacaaatcaagatataagccgcccaacagttcatgactgtctgaatcatgaatcacacaaaacagcacatcctcatgccatgcaacatagttttgtttttgggtaacagaaattttaaccccaaacagtctttgacagatttcaaataaaccatctaataccacaggtagcggaaaatatggacgaagctcatcgctggttaagctgaatttggtttggcggattttttcactgacataagccacatcccaaggtttaagttcatcgagacctaagctttgggcgtagtctttaagttcttgatattctgcataagcttgtggcttggcggcatggcttaatgacagtaaaaatttctcaatctcatcactggtgtttgccattttggtggcaagcgacagttcgctgtagtcttgcatatccaaaagtttggctttttgagtgcgtaaattgatgatatccaccataatttgggcattgtcaaactcggttgtatctgggctttggtcagaggcgcgtgtattataagcatgataaagctcttcacgcagcgtgcgattgtcagcaaactgcatgaccgccaaatacatcggcatatcaagggtggcaacatattctgtttcaagtgttgcctttgggtgcttggcacgataagtttcggctgctgatttaagcagtgctaagccgttttcgctgatgcctgataattcatctgggcgtagtggtcgaacaaaatgacgcgtcgcatccatgacattatctgcaaacttagcagaagccaaagacagtttactttgaatgtcggcaaattgtgcttttttatctgcatccaatgccacaccagataagcgaaagctttgtaaagatttttcaatggcgcgtttttgagcggtattttggtattggcttggtagttggtcaaattgtgtatcaaccagctgatacaaagaaaataaagcgacagattgtccaatgcgtgtgccaagttcagaaattttgggtagtacctcatggtgggtctggcggacggcatcattgctggcaacgctatttaggtgtgatagtacgctaaaataacggtcgagcttttcgctgattgcattaaatttttggattttttcaaatgcttcttttgcgttggttggcaggcttgccgattcaatgtcggtcagagtttcgttggcatcatctaagacggtttgaattaaatttttaagtgtttgaggtgtggctttattaaagtcaatcaactgtaagcgggcgtcaaggggggtattttttaggatgatatcggtatccatgggggattttccttttgttagagtatatcaaaaacagtttgggcggtctaaaagccaaactgtatggggtgcttaaaattttaacccaaatttaaatgcgtacagttttgagttttacaagggtattaaaacaaataatcatcaatttatcatcatcgtgctacaatagccatcattaaaatcaattctaccaacatatccataaaataccacgccatgaaatccattacaatcaccagttataatattcataaaggtatgtcgccgaccaatcgcttggtacgattgatgggcatgaaggatgccttattaaaaaccaatcctgatattttatgtctgcaggaggtgcaagggcaaaatctcaaacgcacgattgattttgctgaatttcctgacggtgggcaacatgaatggtttggcgagtttttgggcattgcatcaagctatggcaaaaatgctgaatacgaacacggtcatcatggcaacgcagtgctttctcgccacccacttgacccaaaacacaacctaaatattaccgtcaatcgccttgaaaaaagaggtgtgcttcattgtgaggtgcatccagatggctggaggcgtcctgtggttgtgttgtgttgccatttaaatttgttgcatcgagaccgcattaagcaatatcaagcaattcgtgattatattttcacattgccagcagatgcatcgctgattttggcaggcgattttaatgattggtcaaaaaaatcttgtcaagccttgtcatcactagggcttagtgaagtgtttttgcaagtgcatggtgaatatcctgccacttttcctgccaaaatgcctgtattaagtttggatcgcatttatgtgcgtaggcttaaggtgcataatgcgatggtgcatggcggtgtgccgtggtcaaatttatctgaccatctgcccatcagtgcgtgtgtttctgagatggatgagtgatgataatatcgtcaaataatgtggctgtatcagcaaaaatagcgatataaaaaataacgccattttgtcatggtatttgataaaattaaccaatccaaccagctaaaaccaatcaatcacaaagggagtaatgatgcaaaagtgggtattagccagcaacaatcaaggtaagttggcagaatttcaggcgttatttgatgacgctgatttgggcgttcatatcatcactcaaggcagcttggggattggcgatgtcagcgaagatgggaagagttttattgaaaatgccatcatcaaagcacgccatgccgccaaagtcagtgggctgcctgcggtggcagatgattcagggctatgtgtccccattcttggcaacgcccctgggattttttcggcacgctatgctggacgacatggcgatgatgctgccaataatgccaaactgcttgagcaattaaaaccctatcgcagccgtgcccccattgatgccttttttgtctgtgtactggcgtatgtgcgtcatggcgacgatccgatgccacttatcgcaattggcaaatggcatggcgagatacttaatgaacctgtgggcgagcatggatttggctacgatccgctgttttatatccccaagcttaaaaaatcatccgcccagctggatcgtgccgccaaaaatgccatcagccaccgagcgtctgcactgcaagatttgcttcgccaattaaaagaaacttggctggtgtgatttttagttttcgcatgggctaagagttgtatttttcacaatgattagctatactgtattgcttttaatatatttatgtggttatagttaaatattctttaattgggatattagtatattttcacaactagattttggtcttttgaccgactgttttttatttttaaatgatttaaggtgagttatgagcgatttacaaatatctgtgaatgtggtttctgataaagaaacgcagctaacggtcaaagtgcctgtaggtaatatccaaagtaaggttgaaagtcgtatccgtagtgttgcaaaaactgccaaaattgatggttttcgtaagggcaaagtgccagtgtcacacattcgctcacagtatggtgctggcattcagcaagaagtgattaacgatgtcattcgtgatactgtctttgaagccattggcaacgaaaaaatccgtgttgttggcgtgccaaacattgatgatgtgaagcttgaagatgattttttggtgtatcaagccacggttgagactttcccagaagtagaagttcaaggcttgggcgaaattgaagttgagcgtcacaccgcaaccatctctgatgaagatgtggataccatggttgaaaatctacaaaagcaacgccaaacttttgaaaccaaagaaggtgagctagaagaaggcgatcaagcaacttttgattttgaaggcttgattgatggcgagaaatttgaaggtggcagtgccgaaaatcacaccttggtcatcggttcaggtcgcatgattccaggctttgaagatggcatgaaaggcatgaaagctggcgaagaaaaaaccatcacggttactttccctgaagactatcaagcagagcatttggcaggtaaagaagcgcaatttatcatcacgctaaaagaagtcaaggcgtcagctttgcctgaactcaatgatgaattctttgagctgtttggtgtgaccgaaggtggtttagatcagttaaaagccgatgttcgcaaaaatatggagcgtgaggtaaaacatgccgctcgcaatcaagtcaaacaagctgcgtttgatgctttgcttgaaaaaaatgaatttgatgtgccaaaagccatgttggatcaagaaattgaccgtcaacgccaactgatgctaaatcgcttttctcagcagtttggtgcagatcctaagacttttgattcaaatatgttgccaaatgaattatttgaagatcaagcattgcgtgccgtgcgtttgggcgttttggtcagccaaatcatcgaatcgcaaaaactcactgttgatcaagaccgtgtgactgcctttatcgcagaagctgctgaaaactatgaagatccagcagaagtgattgaatattataccaatgataaagcacagcgtgcccaagttgagtctgttgtgctagaagatcaagtggtggactatctgcttggtcatgccaaggtgagcgataaaacagtcaattaccaagagttgttggccgcagcccagcaacaagccatctaatcttatgttgagctaggctgattgctgatttgacaaataccccaagctgatgcgtggggtttttgttctaaagataaaaccagatcactgaacattcatgaaaactttgtttttaaagatactaagtttaaaaacaggcattaacgatacaaactgagaataccatgagcataaaacacaatccttattatgaccagctgaccgatgctttatatgcccctaacaatgcactggtacctatggtcatcgaacagtcaggtcgtggcgaacgatcgtttgatattttttcacgcctattgcgtgagcgagtcattttcttgacaggtcaagttgaagacaatatggcaaacctaattgtcgcccagctgctgtttttggaggcggataatccagaaaaagacattcatttatatatcaattcacctggcggtgttgtcacggcaggcatggcaatttatgatacaatgaactttatcaaaccccatgtttcaacgatttgcatgggtcaagccgcttcaatgggttcatttttattgtcggcaggagaaaaaggtaagcgttacgcattggcaaactcccgtgtgatgattcatcagccattggggggatttcgtggtcaggcctctgatattgagattcatgctcgagaaatcattgagctaaaagccaaattaaaccgtttattggcagaacatacaggccaaccgattgaaaagcttgagcgtgataccgaccgtgaccattttatgagtgctgagcaggcgcgtgattacggtttggtggatgtcgtgcttgataagcgaccaaaaaatctataaggggctgttatgacaaccaaagagataccaagttgctcattttgtggcaagaaaaaaaccgaagttcaaaagctcatcgcaggcaatgatgctaatatttgtaatgaatgcattgctgtttgcggggatttattgggagattggtcaaaaccaaccaaatcttctggtaagtcgtctgatcgatcagctgataccagccaccaatcagatgtccagctgagcattgaaacagatagcgataaagatgaatggcttaataaagttctgccaaaaccaaaagagctgcgagcacacttagatgattatgttattggtcaagatgttgctaaaaaggcactggctgtggcggtttataatcactataaacgcctgaaggttgctaatgataaaaaagatacggatggtgttgagttatccaaatcaaacatcttgcttatcggaccgacaggttcgggtaagacgctactggcacagacacttgccaagatgttggatgtcccatttgccatggcagatgcaacgacactgaccgaggcaggttatgtgggtgaagatgttgaaaatattgttcaaaaactgctgcaagcggcagactatgatgtccaaaaagccgaaaaaggtatcatttatattgatgagattgataaaatttctcgtaaaagcgaaaacccatcaatcacgcgtgatgtttcaggcgagggcgtgcagcaagcactgcttaagctcattgaggggacggtggcaaatattccaccccaaggcggtcgcaagcacccacgccaagagatgattcaggtagataccagcaatattttgatgattgtgggcggggcatttgctggactggataaagtgattcgccagcgtaccgaaaaaacaggtatcggttttcatgctgatgttaaagcccaagatgaatcaagcatcaccgaactatttcgtgaagtagaagctgaagatttgattaaatttggtctgattccagaattgatcggccgcctgccagtgattgcaagcttagaggaacttgacgaagctgccttggtgcaaattctcaccgaacctaaaaatgcactggtcaagcaatatcagtatctttttgatatggaaggtgttcaattaacctttgagcctgaagcactgaccgccatcgccaagcgtgcccaagagcgaaaaacgggtgctcgtggcttgcgttctatcattgaaaatgcactgatggatacgatgtatgagctacctagcatgaccgatatcgcagaagtgattgtcaccaaaggcgtcattgagtctggcaagccgccagtgactaagcctaaatcgtgatgggggctgtcatttaagacagcttggatattcatcaaaaatccgccgatagcattcggcggattgctctttaagcagtaccctttcttaaatagtactcctgagtaacgggtaaattcgtgtcatgattcttctttgggttggtgaaatcagttaatgatatcaatcatacaacgccagctcttcggcacgctcatacagcagtgccacctcgcataaatagcgtgcgaccgtttgatcatgacggttgttataggtattttgggcattgacttggcagtgtcgttcacggtcggcattgatggctcgctgttcatcacgcagcagtgattgcgtctcgtcagataactcatcccaaacggcgttaatatgggcaacagcatcatcgtataaggcatgtgcttcactgggcgtatagccctctaaatgattgctgtgatcactataggtcggctgattgggatagctggggtcataaaatagcgttggctgatcggcgacattggctgcataaatacgcaaagtttcggtacgctcatcaagtctgggtacttcgcactgatagcgtgccgtgtctatgtccattgggtggctgtattggctggcagcttgtgccttacaaacctcttctcgtgtgctattgatggagcgttgttcatcacgcagttcatcttgaatggttttgggcagattattccaaacggcattaatgcgatttaccgccgccaaataagcagcatgtgcgtgttcgtatgaggctcgttgttctggcgtgatttcatcaggtgtgaatggtatcataggctcaatggcaaccaatttgggaatactgctgttaggcgtgtcatgatttaagggagtgacaggctcgtcacgatgcccaaaaaatcctgctgatgataccaaaaaatatgccaaaatcaccacagcaatcatcgctatcaatagcccaactagccagcttgtcagtgatgattttttgggtttgggcggctcatgtgggcgataatcatcggttgtctgtatgggcgaatgggtagtttgtgtgccaaagttgggcggcgtcgtgcggctaaaccttgcattcatttgtagccatgagtcatagtctgctcgcttgatgggatctgataaggtttcataggcttggcgaatttgcacaagacgatgagcggcattgggattatgtttatattttttggttaaagcgtgataagcggcatcaatgatttcggtatcggcggataaagatatgcccaaaatgtcgtaataggttggctgtgtcataacaaatacaataaaacctcatgaaagatttgggtcaaaattggataaatcagcttggtatggattgattatgatgtatatcttataaaaatagcgagtttttgtaaataattatttagtcaatgctttgataaaatcatgatgaaccatactgaccgatatttattatatgattttattgatcatatgatttggaataaaaaagtattggtgtgattaagatatgcgtgacccatgggtcatcattaagcaggaatatggcaggtgaaatggcgtgatgggtgtgttatattaaaggtgcgtttgccaagcatggcaacatgattgactaacatcacaaggggtatttatgatttatcaaggaaaaaatattcaggtcgatttttttgaccaaacacaaggtatcgtgcagtttcattttaatgccactgatgaaagcgttaataaatttgatcgcaaaaccactcaagaatatcaagaagcggtaacagtacttgaaaaccgtgatgatattcaaggcttaatcgccacttcaggtaaatcggtgtttattgctggtgcggacattactgagtttaccgaatattttagtcgctctaaagatgaaattgaggcatggcttttggatatcaatcatatttttaatcgctttgaggatttgcccttcccaaaagtggcggcgattaatggtgcagcgttaggcggtggctgtgagatggctttggtatgcgattaccgtgtggcgggtatttctgcccaaattggtttgcctgaaactaagcttggtatttttccaggttttggcggttcggtgcgtctgccacgcctgattggtattgataacgcccttgaggccattgcgacaggtaaggcttatcgacctgatgaagcacttaaattgggattggttgatgcggtggtggctgatgagctgcttgagcaggcagcggctgatttggtcaaaaaatgcttattaggcaagtttgattggcaggcgaagcgtcaagaaaaacaagtaccagttaagctcaatcagctggagcaggcaatggcatttaattcggctaagggtgtcatttttgccaaagccaatccaaaacattatcctgcggtggcgattgcccttgagaccatcgaaaaacacgccaatttaaaccgtgatgatgcgattgcccttgaagccaaaggttttacaaaagctgcaacaaccccacaagcggccgccttggtcggcttatttttaaatgaccaaacagttaaaaaacttgccaaaaagcacagtcaaaatgcacaaaccatcaagcaagcagctgtacttggtgcaggtatcatgggtggcggtatcgcttatcaggtagcggtcaagggcttgccaattattatgaaagacattcaagccaagcagttagaccttggcatgaatgaagctggtaaactgttatcaaaagaggttttgcgtggtaaatcaacgccagctaagatggctcaaaccttaagccacattcgcccaaccttaaactatggcgattttggtgaagttgatattgtgattgaggcggtcgttgaaaatcctacaatcaaagaagcggtattgtctgaggtggagagcttggtaaaacaagagaccattttggcctcaaatacctcaacgatttctatcactcgcttggcgaatgccctaaaacgccccgaaaactttgtgggtatgcacttttttaacccagtacatcgcatgccgttagttgaggtgattcgtggcgagaagaccagcgatatcgccattgcaacaacggttgcattggcacaaaaaatgggcaaaactccaattgtcgtcaatgactgcccaggatttttggtgaatcgtgtgttatttccttattttggtgcgttcgatttgctggtcaaagaaggtgccgattttgttagtattgataagaccatggaaaaatttggctggccgatgggtcctgcgtatcttttggatgttgtgggtatggatacaggcgtgcatgctgccaaggtgatggcagagggtttccctgatcgtatgaagccagattataaaggtgcaacgcagctgatgtttgagcatgagcgtttgggtcaaaaaaatggtgttggtttttatcaatatgaaactgataagcgtggcaaacctaaaaaaattgccgatagtaccacttatgagctgttaaacttggttcaaactggcgatcagacttttgatgagcaagaaattatcgaccgcatgatgattgcattttgcaatgaaaccgtacgctgcttggaagataatatcgtcgcaagccctgctgaagctgatatggcgatgattatgggtgtgggtttcccaccatttcgtggcggcccttgccgatatatcgaccaaatcggtgtcgcaaactatgttgcattgtgcgataagtacgcatatttaggcaaggcatatgaagcacctgccaaattgcgtgatatggctcaaaatggcgagactctttactaattattgctccaattatccaaggaaaaacaatgacaactctaagtccaaaagatgtagtaatcgttgatggtgtgcgtacggcaatgggtaaaaccaaaaatggtatgtttcgccatgtgcgtgccgatgatttgtcagccaagctgattttggcactgattgtacgcaatgatattgatccaagcgagcttgaagatgtgatttggggatgcgtgaaccaaacacttgaacaaggctggaatattgctcgttatgcagccttattggcaggcgtaccaaaaactgtggcagctcagactgtgaaccgtttgtgtggttcatccatgcaggcgttacataccgctgccgctcagattatgaccaatcaaggcgatatgtttatcatcggtggtgtggagcatatggggcatgtgtcaatgatgcatggcgttgacccaaacccaaaggcgtctaaacactatgccaaagcatcaaatatgatgggtctgaccgccgagatgctaggtcggttaaacggtatcacccgtgaagagcaagatacctttggggtgcattcgcataaaaaagcatgggcagccacccaagcaggccgttttgataatgaaattgttggcgtagaaggacatgattctgaaggtaatctgcagttatgcactgtcgatgaggtgattcgtcctgatgctaatttagaggcattccaagcacttagacctgtatttgaccccaaaaatggtacagttactgcaggcacagcctcggcactgtcagatggtgcttcagcaatgcttatcatgtcagcccaaaaagccaaagatttggggttaaaacctcgtgcacgcatccgtggcatggcggtggcaggatgtgatgctgcaatcatgggttacggtcctgtgcctgctacccaaaaatccttaaagcgtgctggtcttaatctgtctgatatccaaaccattgagctaaatgaagcgtttgctgctcaaggtctatcggtactcaaaggcttggatttacttgacaagcaagatatcgtcaatcataatggtggtgcaattgcgttgggtcatccgcttggctgctctggcgctcgtatcacaaccacgctgttaaatgtcatggagcaacaagatactcagctggggcttgcgaccatgtgtattggcttaggtcagggtatctcaaccatcattgagcgtatctaagatcacgatgtgtgttagttaagatatacagccagcacaccaaaaccccaagcgtaatcttatgcttggggtttttaacatacattaagacaatatcataaaaataccgtcaagatgcgcattttgacggtattttttatgattgggctgtttgcatttgggcgcgttttcgtgtgtgagcgtctttgatggcttttttgatggcagggatttgggcatctgttgctaatctgccttcattgatcagtcgtgtgcggtcagtgctgtcaaagacagcagcacctgtcatcttgggacggattagcacatcggcagcacggatatcttcaggttcggcggtcaaattggcacccaaattaccaaaccaccgagcaaactcagaggtcttggtaggtagctgttttggtagagaaatattggtgttagtaggaatagactgcatgataacaccaagcaaatcacccaatggtatgtcaataggcaagcctctggcagtttgattgagcttatcaagattgactggcacagtcatggttttatcgccccatgtggcactgatacctgcatgattgcgttggatgttgatactgctgccttgagtaggcagagcgtttgaattgggtgatgcttgtttttcacccatgacatcgacagcgatgataatatcagcacccagacttttggcgatgcgtgtcggtaataacgccacctgtgagccatctacatattttttgccgcctattttgggaatgcgtgtggaatgaataattttgtgacgctagatgaagcttgactgccaaccccgcctccccagttctaaaagttactgccgtattggtgtgcatctgtgttgccaccgccgcatagcgtatgggaaaagcttcgatggggcgatggttgacttgctcattgacatagcgacgcaggcgtgttccgtcaatcaagccctgctgtgagggcgtaatttcaatcaaatccgtttctttgacagtatcggcaagagcgatcatctcagatggtgtcttaccactggcatacactgcacccaccagcgccccagcactggtaccgaccaccatatcaggacggatgccatgtgcctcaagggacttgatcgcaccgatatgggcaaacccacgcatgccacccccactaagcaccaaagccacgacaggacgagttttatcggcgtttggcgtaaccaaacttggagcggtagatggtggcgtcgtactggcataagccgtcagtatcggcacaaagatggatatggctgctgcaaccaatctcatgacaactcctaaaaataatcaaaaataactatgaactataccatatctttggtgcgtggatagttgacaaatgcgattttatgtcatgattgtgtagagattttacaaatattcacaaacattcttcaatttaaaggcattggtatgacttattttgggtataaatttggatgtgaattggttgagattggcttaacggtgatggctaatgccaaaaagtgatttactttgtacaaaaagttatttttgattttttggcggtggtgataccttgtgttgtatccaagtgaacgaattcataaaatcatcttgccataatagttagccaatttgagagccaaaatcatgatgataaaacccatactgtggcggattccagtgccaagtgatgagacgatacaaggtcttgatgccaaaatcaaaaccttacatgctcgcttatcagatatccatgccaagcaccatactgtcaagtttgccagtagtttgcaggccgaggatatggtcatcaccgatgcattggcaaatagccagttaagtactgaaatatttattttacagacaggtaggctaaacgccgaaacacttaagctcatcgacatcgtcaaggcatgctatcttacaataaattttaaaacttatgagccgcacccgcacgctgtggcagactatgtggcaaatcatggcttaaacgctttttacgaaagtggtgatctacgcaaattgtgctgctttattcgtaaagttgagcctttaaatcgtgctttggtcgatgctgatgcttggctgacagggcaacgccgtgagcagtcagtcactcgcaccgagctgaatttggcagaaacagatttgacgcgtggtattgccaaatacaatccaatttttgattggcaagagacggatgtatgggcatatattttgaccaaaaatataccgtttaatgagctgtatcaccaaggctatccttccattggctgtgagccttgtaccatgcctgtcaagcaaggcgaggatatccgtgcaggacgctggtggtgggagcataaagataataaagagtgcggtttacacaaatgacttgggggcgtgtatttaaattaagcaccttaacagacaagcccagatttagacaattttatttagactgataggtaattatcatgacagcaactattctacaaaacgagcatttagattggcttgaagcagaatctatttatattatccgagaagtgatcgctgagtgccgtaatcctgctctgctattttcaggaggtaaagattcagttgtgctacttgcactggcacgcaaggcattcgccatcaaaggtcgtgatgtggcactgccatttcctttggtgcatattgatacagggcataattatcctgaggtgattgagtttcgtgatgcacaggtcaaaacgcttaatctgcgtttggttgtcggtcatgtcgaagactctatcgccaaaggcacggtcgtgctgcgtaaagaaactgactcaagaaacggtgctcaagcggtcaccttgcttgaaaccatcgaggcgtatcagtttgatgccttgatgggtggtgctcgtcgagacgaagaaaaggcgcgtgctaaagagcggattttttcatttcgtgatgagtttggtcaatgggatcccaaagctcagcgtcctgagctgtggtctttgtataatgccaagcaccatcaaggagagaatatgcgtgtatttccgatttcaaactggacggaacttgacatttggcaatatatcgcacgagaaaatcttgagttgccttcgatttattatgctcatgagcgagaagtggtcgaaaaaggtggacttttggtgcctgttacgccattgaccccaaaagctgatggcgatgtcagtgaaattcgttcggtgcgttttcgtactgtgggtgatatctcatgcacctgccctgtggcaagtcttgctgccacgcccaaagagattatccaagagactgctgtggttgagatttcagaacgcagtgccactcgccttgatgatcaagtcagtgaagcggcgatggaagtacgcaaaaaacaaggttatttttaatacaccaaataactattaagacaatttatcatcttaattaaataatattgaataatcttgattgggttagcgtccccacaagctgatcgccaatcaatgtatcaaaacaagcaaattcacaaacagattatcaggtaaaaggacaatcagatgagccatctaaatacccatgcaccgctaagatttatcaccgcaggtagcgttgatgacggcaaaagcaccctgatcggtcgcctactttatgacagtaaggcactactgaccgatcaactttacaatctaaataataccaaaaccgcaggcgatgccattgatttttcggtactgaccgatgggcttttggcggagcgtgagcaaggcatcaccatcgatgtggcgtatcgctacttttcgacagccaagcgtaaattcatcattgccgacacgccagggcatgagcagtatacacgcaatatggttactggtgcctcaaccgctcatgcagcggtggtactcattgatgcatcacagattgattttggacaagctgaagtttggcttttaccacaaactaagcggcattcagccatcttaaagcatttacgctgctctcatattatcgtggcgattaataagatggatttattgaattttgatgaaaataaatttaacaccgtcgtgcgtgcttataaaaaattggcggcacagctggatttacaagatgtcaaatttgtgcctgtttctgccctaaatggtgataatatcgtccataagagccaaaatacaccatggtatcaaggtggtacattacttgagatattggagagtttgcctgtgggggaagcggttttgacggatacggcagcgtttcatttgccagtgcagtatgtgttgcgtgctgatggcgacaaaaaagatgattttcgtggctatcaaggtcgtatcgaatcaggcagcgtttcggttggtgataaagtgcgtgttgagccatcaggtcgtatcagtcatatccaagagattatcagccccaatggtgtcgtcagccgagcatctgtgggcgaacaaatcaccatcacgctcaccgatgacatcgatatctctcgtggtgacagcatcgtctcggcagtatctcagaccctgccgaccaagcgtctgcgtgccacattatgttggtttgatgagcgtgccttaaatcctgctcgtaaatatttattaaaacacaccacccaaaccgtttttgccaaggttgatgagattcatcatatatgggatgtgcatactttgtcaaattttgctgatcaatcaaccctgaatatgaatgatattggtgaggtgagtatgagtttacaaaagccaattttggcaacctcttacgcccaaaacaccgccacaggctcatttattttgattgatgaggcaacttatcataccgtggcgggcggaatgattttggcagaagagacccaagatttttaagtggctttgggacaaatctgtaaaaatctgaccaaaatggtcggatttttgcttttttaacagaattattttacaatcatgattgcgtttcattattcatggataaatttatgaccaagcccgtcatgaccattcatttgcctgtgactgcactgtctggtgtgggtcaggcactggctgggcgattggccgagcttggcattcatcgtatttttgatatgcttttgcacctgccacgagattatgaagatcgtagccgtgtcattgctatcaaggatgtcagtcatggtatgagtgtgttggtggcgggtgttgtgacttgggttgaaaagaatcgcacaggattatcggtgaccttagaagatgccacaggggagattacgcttcggttttttcatacttatccaagtctattaaccacaatgatggtgggggcaaaaatcaccgtatttggtgagataaaggttagtcgctacggtacacagatgtctcatcctgactatcatctgacaggcacaaaaaagtttgaatctgggcttttgcccatttatcccaccatcaaaggcatcaatcaaaataaacttaggcagctggtgcgtctggcactgacagctgttcagcaagatggcattcatggcttatcagaaacacagctaaaagcagcaggcgttgagttgacgggcgatctattgccagcattaaaagcggttcacctgccagagatacatgctgatatttttagccaaactgctttactggcaggacttaaagatcgtactcaccctgcctgtcgccgtattatcatcgaagagctggtggcacatcaggtcagttttttgtttcggcgtaatcatatttatcagtataaagcacccaaatgcgacccaattagcccgcttgccaagcaactggtggcaggtctaccctttgagctgaccgccgcccaaaagcgagtcattgatgaggcggtgtctgatatggcgacatcacgccccatgctcagacttatccaaggcgatgtcggtgctggtaagacactggtggctgcgatgacagcatgctatgccttagatagtggttggcaggtggcagttatggcaccaacagaaatcttagcagagcaacatttaataaattttcaaaagtggtttgaacctttggggattggggtcgggtggcttgcgggcaaacaaaccgccaaagagcgtacagcagcactagatgccatcagaaaaaatcaggtgcaaattgtggttggtacccatgcactgttttcagatacggttgtttttgccaaattggggcttgtcatcatcgatgagcagcaccgatttggggtagagcagcgtctgcgtttaaccaataaaggcgtgtcaggtggagcaccgcatcagctggcgatgaccgccacgcccattccaaggacacttgctatgagtatgtacggtgatatggatgttagtattattgatgaattaccgcccaagcgtacgccaatcaccacagtgacgattaaccgagatcgacgagacgaggtgattgagcgtatacaaaataactgccaagctggcaagcaagcgtattgggtgtgtccactggttgaggagtcgtcggctttggatgtgcagtcagcccagctgacttatgaggatttaagcgatcggcttgatattcgtacagggcttatacatggcaagatgaaagctgccgacaaacaggcggtgatgcaagcttttaaggcaggcgatatagatttactcatcgccacaaccgtgattgaggtgggtgtggatgtgcccaatgcgtcattgatggtgatcgaaaatgccgaacgcttaggattgtcccagttgcatcagctaagagggcgtgttgggcgtggatctgccaaaagcttttgtgtgttactgtatcagctgccattatcaccaacaggcattgagcgacttaatgtactcaaagacagcaccgatggctttgtcattgcccaaaaggatttggagctaagaggtgcaggtgagcttttgggtaaacgccaaactggagacatgggttattatttggcggatattgtgcgtgatgaggcactgcttgaggcagcaggtgacattgcatgccaattaatcaaaacttctgataaactgccaacagcattggcaatcatgaatacttggctaccggaatctaaagattatgtcaatgtttgatgactatagcttggcattatttgccgattgtacacgcttgactgacagccaaatcatccataaatggatacagcattgggcatataccatgcctgagctaagcgaagagcaagtcaaagatgtggtgagaggatttcagatacagcggctgcctgcaagaagctattggcaagtggcagggcaggtacaagatcacattggcgtcatcttggcaggactgtgtaagcttgaatatcagtccgatcaaggcagtgtggtcaatgtgcattttatgcaagaaggtgatggtattggtgaatatcacgcatttcttggcgatgaggtttgccgatatagcctacagaccattgaacctagcatcatcatcgccataagcttggcacattatgaatactgctgtcagcgttatccgattttttatcgttatattggccaaaatctgacccaagtcttggcacaaaacatcgctcgtatcgacagcctgcttatcaccgatgggcagactcgttatgttagatttattgaaacaaatcccaaattggcggccagaatttcggtgtctgattcgagttcttatttgggtatgtcacgccaaatgcttacacgcatccgcaaaaaactgggccatcgccgtgcataacccaagcttggttggcttgatgttgagcaaatgcgtattaactaaatggattttataaggtatttttatgactgttcatcaaaattacaagtcatcacctgctcgacccctttggcaacggaagataatagcttggggtgggtactaccggaggtgtactcaacgggcgatctatgggatcaccaaatcaagagacaccgtccaagcaagctgcccaaaaccaaaacgcagcagtgatggcggtggaagcggtacatcccacatcgataacaatcaaaaatcgcctgtcagctaatggcatcgtggctgcagttgaaacggcggaggttagtagtcagatcagcggtgtcgccattgagcgggtgcttgttgaagttggtgaatttgtcaaagcagggcaagtgcttgcaacacttgatacacgaacctttgagcaacagttgtcttctgctgaagctgagcttgccacagcggttgctgcacaagaaaaagcggctgccgatttggcacgcaccgagccattgttagccattgatgcggtgagccgccaagaagttgatgcttatcgcactgcacttcggcaagctttggcgaatgttaccgctgcccaagcccatgtcgaaagtgctcgtactaatcagtagtgaggtctgattactgcccctgtcagtggcataatcagtgccaaaaatgcgcaagttggtgcagtggtatcaggcaccccgctattagcatcatcatagatggcatgcttgagtggcaagccgccgtgccacctgctgatgccgccaatatccatgtgggccaaacggcgtctgttgagattgcaggtcggcaggtgataggaggggttgctcgcctaagtcctgttaccaatgatagccgagatatcaccgtccatgtgcgtctgctaagagacagtggtgccagtgctggcatgtatcaatctggcgagtttttatttgatgcccaaagatacaatgccattccgcttagtgcgttgatgggtttagatggctatgattatgtttggtaattaataccaaacatcggtgacgatggtcggacatatcaccaagtcaagcgtcggcagattaccatcatcacccaacaagacaatcaagttgcaatagatgatttaccgcaaagtgacttgattgttgcaaccagtgccagctttttagatgatgatttggtcattgtcgtaaccatcaacgggcaagatgtggatcataatcaaaccagtaaagcaccaaaacctgctttaaaccccagtcatggtaacacacgctaaggtgatatcatgaatatttcggcttattctatcaaaaatcctttggttgccattttttaccttgatgatgattttgggaatttatggatttttacaaatgaaaattcagcaatttcctgatattgacctaccgggggtggtaacaaccattactttggcgggagcatcgcctgaccagcttgaaaatgatgttgctaaaaaagttgaaaataaacttgccaatattgagggcgttaaaagcattcgcaccacactacaaacaggtgcggtaaccatttttacggtctttgagcttgaaaaaccgaatgatgagcacttgacgatgtgcgttcagctgtcagcgaagttcaagggcaattacctgctgctgccaatccgcccatcatctcaaaagtctctacagcagggtttcctgtggcgacatattcggttgctgtgcagggcatgagcgataccaaattatcatggtttgtcgatgatacgattaccaaacaattatcaaatatcgctggggtgggaagtgtcagccgtattggtggcgttgagcggcagattttgatacagcctaagatggatatgatgacaagcttatccatgcccatcaaccagctggctcggcagatttatgccaaatggcaagatgcttcaggtggtgaagcaaagattggcaatcagattcagacaatacgcatactaggttcaggtcaacgggtttaggaattaaatgacctacaaatcaccacaccaacaggaacagcggtacgattgggtagtttggcggttattgaagatacccatgctgatatgacatcattagcaaagcttgacggtgaagaggtggtggcatttagtatcatacgctcaaaaggtgcaagtgagacctccgtggtggccgcagttgatgatgccttggctgacttacaggctcaaatgactgacctgaaaatcgaaaaaatcgttgatacgctgcacccattgaagaaagctatcaagcaacgatgcgtatgttgattgaaggctgtattttagcggtgattgtggtatttatctttttaagagattggcgagccacttttgtggcagccacggcattgctattgtctattattccaactttttttatcatgtatttgtttggttttagcttaaacatgatttcgctgttggcattgactttggtgatcggtgttttggtggatgatgcaattgtggagattgaaaatattgttcgccatcttaatatgggcaaatcccccatgcaagctgccattgaggcggctgatgagattgggcttgcggtcgttgcaacaacttttacgctgattgcggtatttttgccaacggcatttatgagcggggttgtggggcagttttttagccaatttggttgggcagcggttattgcaatttttatttcactgttggttgctcgcctgctgacaccgatgatggcagcgtatattttacgcccatccatttacacccaaaaacctgctggtaaattgatgacagcttatcttcagatggtcgcttggacgctaaagcatcgcaccatgacagtcgcctttgtatcgggattttttattacctcgctgatgttggcatcttttttgccatcggcatttattccacctgatgagatgaaccaaacccaagttagcattgagctgacacctgatgcaacctttgatgatacgctgcgtatcgcccaaatggcggtcaataaagtcaaagcagtcaagggggttgaaagcgtcttattaacagtaggttcatcacacagctcaggcgacccaagtagtatgcgtagtggatcggtcaataccgcaaagcttgatgttaagctttctgaccgcactttacgcgcaagcaaagtggacatcgaatcccaaatcaatcaagcacttttgaccgtaccagcggcacgctttaatgttggtatgtcagcaggtggcggtgaggcgggctatgttttttcgatcacaggtgctgatgcaaaaaaacttgatgccaccgctcatgagatcatcagacaaatccgtgtcttaccgatggtggcaagtgtgattaataacaatgcctttcccagacctgagctgtcagttattcctgatgagctgagcatggcggataaaggtgtcacaacggcagacttggtaaatacattgcgtgttgctacccaaggtgattatgataatgccttaccaaagcttagcctagatactcgccaagtgcctattgtaactcgcttaagccatgaagataagcaaagtttaaccactttatccaatctttatgtaccaagttcaaaggcgatgcctgttcagataaaagatgtcgtatcttgaaaattcaccacaggtgaggcaagtattagccgtctagaccgtgagcgtgccataaaaatcacagtattgcctaccaaagatgcctctttgggcgatctgattgatcgtgtcaaatccacccaaattatgcaaaacctccctgagggcatccatctgattgatgaggggcaagctgaggatatggctgagctatttactggcttgatacttgcgatggcggttgggatattttgtatttttgcggtgctgatgctgttgtttcatcgttttttacagcctttaacgattttgatggctttaccgttatctgttggcggtgcatttattgggctaattgttacaggtagtagcatgtcgatgcctgccatgattgggctgatttactcatgggtattgccaccaaaaactccattttattggtggattatgccatcattgctcaagatgaacaaggcttaagctgctttgatgtgctcattgatgcgtgtcgcaagcgtgctcagcccatcatcatgacgaccatcgccatgggtgcagggatgttgcctttggtgatcggattaggcggggttgactcgacatttagccgcccaatggcatcagcggtcattggtggtttaatcacctcaacattattaagcttggtggtgattcctgtgttttatgcgttgatggacgatttgggaaactggttaaaaaagccatttaacaaacgccatcggcagataacttaacatgcctcatcaaactgcttataaatgggtcagatcagtgggtgaacaacatcaaaccaagaccaaagctaatcaaacaaaatccacatctgggtgttagtatggttagctataggatgattaattaatctgtcttaatcttgtcttaaaatgataagtttaagcggtgactaatatttaagcggcagctaataaagacgatttttattttatcagtgttattaatatgaacgatataatgatatgtttggagagattatcatgcaccctttggcacaatcggtattagaattttggttttcaaaagacgctcagccactgtggtttgctaaatcttttgagtttgatcaaaagattagtcagcagtttggcaaggtgctagagtcggcgacagctggcgaatgtgcagattggcgttgtgatattttgggtcggttggctgagattattgtgcttgatcagttttcacgcaatattcatcgagatacaccaaaagcttttgagaatgatggtatggcgttggtattatcccaagaagcgatcgtattaccagagtttgagtctttagccttagatgagcgtaagtttatgctcatgccgtatatgcattcagaatctaagctgattcataaaaaagccatgacgctgtttgagcaattcaccgatgcaacaaccgtggcgtatgagcgtcggcataaagaaattattgatgaatttggacgctatccgcatcgcaatgcgatacttgggcgagtatccaccacacaagagcaagcattcttaaacaagccgaacagctcattttaagccatgttgtgctgccattgccagatatttttgatgaagtatatcaagggtttggtggagttcatcaagcgttttatcattgactaagatatctgcaccgattttttgagccaagtccagtcgctgttctcggctgatttgttgatcgatgatggcttggatttgagtgggattatgaccatcacgcttggcaacacgctgtctttgaatcttactactggcatctacgacaagcaaatgatcacaaagtgccagcagattgggggatttgtgtcgcccctcaaataaaagtggcaccgaaagtatcgtataagcagactgtgaacagccaagttcatctaagatggcttgatgaatggcagggtgtatgatggcattgagctgatctaaagtctgtgaatcactaaatacccgcgcccgtactgctgcacgatcatatctcccgtgatgatcaagcacccaatctcccagtgctttttttaaggtaatcaaaagtgggctaccatccgatgttaggcgatgagcgatgatgtcagcatcgaccactgtgatgccttgcttaccaagatagtcgctgacagcactttttccactaccaatgccacccgtcaaacccaatatgaacatcatctctccttatggtatgttttaattcatgtgagtttcaatcattgttgaccatgttaaatgaactcattttaaataaactaacagcagtcaagtagccaagttctgtatgtctaccttaaatcaatgataaaagtttgatcaaatatccttatctgatgccaatatacgcctgtatgtactcgccaaagagcaacaccacccaagctgccataataagatatggtccaaaagcaaacgcagatgccttaccttggtgtctttggatgatgatgcctgccaccacacccaacgccgcagcgataaacacaattataggcagctgccatataccaagccatgccccgcaagcggacaaaagtttggcatccccaagccccatgccatcttgtcggcgtgccaaacgatacaaggcattgattagccaaagtaccaaaaaaccaacgaccgctccaaagatggcatctacaggcgtggtcaaaaccccaaagccatttgccatcaagccaatcatgccaagtggcagcacaagacgatcgggcagtagttgcactcgatagtcgatgcctgccagcccaagaccaaaccacacaaagatcaccgacaaagcaccaatgattgatatgccttggatagccagtgtactgatgctaagcaaggcactaagtggcatcataatggcgtataaataggcaggtgcaactttttgatgataagatgacccaaagcctgtcaaaagcttatcttgggcatcgtctaggatgatgggattaatcacctgtatcatttctgcctgccattcaagcatcattcgataaggtagggtatatatcagatggataagatagccgcccacccctgcacccagtagagcaattagggtgtaccatatccagttgggcatagacgccaatgatattaaggccattatgcccccatgctcatattaaatattggtaagtacatcgccagtacaagcccaccgatgagcacacccataacaatgatgatggcaggctcaatcatgccaatcaaagcatcaattttatctttgacctctttatcatggtgtttggcaatttgatcaagcatctcagacagcctgcctgaggcttcgcccaccgttaccatctgcacactcatgggcgaaaacagcttggtgtctgccatggcttgacccaacggcgtgccagttttgacagcttttgcaatctgttcactggcatcaaaaaatagcacatgatgacaggctcgccccgccaaaacaatactctgtgccaaaggcacgcctgagctaaatgtggtggataatgtctgagcaaaacgcgcgctaccaaccgcttggatgagtttgccaaaaatgggcaaaccaaaagcagtgttggcacaccaaagccttaggcgtgtattggttttataaaaataaataaacagtccaatgctcgttatcgccaccaatagtagctgccaaaaatttgccgacaaccattgtgacagtgacagcacccacagcgtgatggttggtagctcattgcccatattgccaaagcttgctgcaaagcttggcacgacttttaaaagcatcacggtgctgacgataagtgaagtcagtgcgatggcggcaggataacgcaacgcttgattaagctgagattggcgaagtgcttgttgttcagcatgctcagcggctcgctcaagcataatatcaagcgtaccagatttttcgccagcatcaatgagcgccagtgctaaactgccaaactctggatgactggcaatggcttgggtgaaattctctccttgctcgatgcactgcttgatttggatgagcttgtttgataagcggccgttcgttgtggtcttagcagcgatatctagtgcgtcggtcaaaacgacacctgatgttaagagtgttgccaaggtacgaagactaagcaaaatctgcttattagcaatgggacgctcaaagtgccaccgcgcttgcttggcagtcagatggatatgataaaagccttgtttgcgtagccgtgcctttgccaagctcatgttattggcactgatttgaccgctgaccgttttaccatcataagatttggcatgataatcaaacatgagcattttgggcgatttagacaaggtcttatttgtcatgccttgattagccaaaggtttgtttaattttttcattaaaaatgcgatttatccacagtatgatgcacagtgctttagtgatttagccatgattcagaggtgacacggtgcatctcagtgaggctaatttggccggtgagtacttttttgatgcctgcttgtctaagattgtcatggccttgggtgcgtgccaaagcatcaattttggcggcagatgcctgcgttaaaatcaattcggccatgggcggcgtgatgggtaatacctcaaagatgccaatgcgtcctttgtggccatttttacatttatggcatccgacaggtgcgtacagtgttggttgtttggcgatatcttgatcactaaaccctgccaagcgtaatgcctcatcgggaatggtgatgggttttttgcattcatcgcacagtcggcgagctaatctttgggcgatgattaggcttaagctgcttgccaaatgaaaagatggcacacccatactgtgcatacgcgtgatggtatcactggctgaattggtgtgcagtgttgataacaccaaatgccccgtttgagcggcggttgtggcgatttgggcggtgtcagtatcacgaatttccccaaccataatgacatcagggtcttggcgtaaaaatgctctgagtgcatcggcaaaatccagctgtactttaggattaatattgacttgattaataccagccaagttaatctcaacaggatcttcacagcttaaaatattaatttcaggctgattaagacgcatcaaagctgtgtacagcgaaactgtcttacctgatcctgtaggacctgtgaccaaaatcatgccttgagggcgtgatagtgcatgaataaataactgtttttgagcatcgtccatgccaagtgcatctaacccaatgagtgcctgagcagagtccagtagcctaagtacgaccttttcaccatgtaaagtaggcagtgtgctgacacgaaagtccaccgattgcccatcttgagcatcaaattttaagcgtccatcttgagcacggcgacgctcagcgatatccaaatttgccatgactttgatataagaggcaatctgagcggccattgatttgggtggattgtgtatcacttgcattaccccatcaatacgaaagcgaatgcgataactggcatcataaggctcaaaatgaatatcggatgcttttaggcggatggcatcggtgaataacttattgacaaagcctacggtgggggcgtcatctgttgtagcttgggagtttggccctattttttgggtatcctcaaaagtatctgtatctaaatatagtctatctaataaggcagatagcttatcttcttcaaccagcataggtcggatctgacggcgtgcatgaaaacgcatggccccaatggcatctttatcggtggcatcgctcatagctaaggtcagcatgtgcttatcacagcttaaaggtagcattcgatatttaataaataatgcagggtctaggcctgtttcaacgacttggctaagctgactgggcggctcataaatgggtaagttgtagcttaaactttggatgtgcaaaagcttggcggcatcaatgagtccgcttgcgaccaaatgctgaacaaatgagcgttgcaaatttttggcatcagtggcagcttttgataaggcatcttctgtcatcagctgatgttgtaagattaggggggcaagtgatggcaggacggcggtcatgggtggcatcaattaaagaaaagaacgaaggttatttttatcaaaaataagcagggcttgcaagatattttgcaaatgaataaaaattaaaataaacatacctatgatacaataatcagttttataacaaacccatacataatgatagtttaaaatgaccataacaaacaatcaagagacaaaatttcccgtgctttgggtgatgatgctgggcgtgatgattgccatcggacctttatcgattgatatgtatttgcctgcgtttccgagtatggcagaagattttggcgtcaatgtcagtacaattgccaaatctgtgccagcgtattttttgggattggtgtttgggcagctgttttatggaccatttagcgaccgtattgggcgagtacgcccgttatacttgggcatgagcatttttatcatcgcatcaatcatctgtgcaacaaccaataacgcatatgtgctatttattgcaagaaccttacaagcacttggtgcctgtgtgacgacagtagtcacacgagccgccattcgtgatacgctcaatccagtgcagtcagcccgtgcttttagtttgatggtgcttgtgatgggtgttgcaccgattttggcaccaagtttgggtgcattaatcttaaaagtggcagattggcatggcatattttggtttttggcaagttttggggtgctaaatttattattaaccaaatgcttcttaaaagaaaccctaaagcctgaaaaccgcaatactcgcccgatgtctgaaagctttgggcaatattttggtttgatgaaagaccatacttttatgttgcctgcagttgcatcagggctgcttcaaggtgcgttttttatttatttgtcaatttcaagtgagctgtttatggtgaattatcggctgacagagcatcaatttgccatcgcttttggggtgaatgcgtttgggtttattgcattgacgcaggtgaaccaatttttaaccaagcgttttcatttggtgaatctactacgcacaggggcagtcattcagttggcggcagctggtgtcttattgatattggggcttatttttggcggtaaagcaagtttttattgggtatttgtcagtctgtttatttgtattgcaggacttggtttgacacagccaaatgcaactgccattactttggcgtttcaaaaaaagcgtgcaggcttggcaagtgcattacaaggcgcattgcagttttcggtaggtatttttggcggtctgctgattggtttatttgagttagatcctgttacccgccttggtatcacgaccagcattttggtagcggtgggtacttttttggtattttatatcaatccaaagcttgatttatctcgcctagactgagtgctttttaaggtgcgattaagcccaaaataatcttgatattggggatgaaattttcgttccttgtttgatttacctaaaatattgccttaaaatctgttataataaaagacatttatttttgataccattgccacctttttggcgtctttagcaaagggtaaccaccatgatgagcaccatcgcaggcttggagtttttgacagattttcaagcacaaaaattagccgaccaactcaaacaaaaagctgggctaaatatttataccttgagcagtcagcaagtttatgtgtttgatacaccgctgtcagaatctgaccatcaaaaggcgattgatttattaaaccaaggtcaaacgcccagcctaaagaccgctgatgatacacaaattcaagtggtggttgcacctcgttttgggacaatcagcccttgggcatctaaagcaacagatatttttaataactgtggtgtcactattgggcgagttgagcgtgtcattgtgtatacacttacaggcgagaatttgcccaagcgtttgcctgccatcgctgaatcaattttacatgaccgtatgacccaaagccttgtctatgagctatcggatgtgtcggttttgtttgttgatggcgaacctgcccacttgagcgtggttgatattttgggcatgggtaaagatgctttagtacaagcaaatgctgaatatggttttgcattatccgaccaagatatgacatatttggtggaaaatttcaccaagttgggtcgtaacccaacagatgttgagttgatgatgtttgctcaagccaattcagaacattgccgtcataaaatctttaatgctgaatggacggtagatggcgaggtgcagcctaagtctttatttaagatgattcgtaacacgcatgaacaaaatccagagggtatcttatcggcttataaagataatgccgctgtcatggagggttttgtggcagagcgtttttatcccaccaaaacgaccgaaggcaatgcccaatatgggtttcatcaagagcaaattgacatcttgatgaaggttgaaacccataatcacccaaccgccattgccccatttgcaggtgcagcaacgggtgcaggtggtgagattcgtgatgagggtgcaacaggtcgtggcggtaagcctaaagcaggtttgacaggatttagtgtttcgcatttacatctaccgacgatgcctgaaaaatgggaaacaacagggcaggtatcggccgtcagttatggcaagccttctcgtatggcatcggcactggatattatgattgaagggccgttgggtggtgcagcatttgccaatgagttcggtcgccctaatttaaatggttattttcgtacctttcagctagatatctctgatcatcaagatggtagccaaatgcgtggttatcacaagcctattatgattgcaggtggctatggtaacatcaagcgtgacttggttcaaaaaaatgccatccaagagggggatttgttgattgtattgggtggacctgccatgcagattggtttgggtggcggtgctgccagttcggttgatagtggtaaacttgatgagggcttagattttgcttctgtacagcgtgataatgctgagatggaacgccgttgtcaagaggtgattgatacctgctgggcgatgaccaaagatggtatggatgccaacccaatcatctcaatccatgatgtcggtgctggcggattgtccaacgccatgccagagctggtcgatgatcatgaacttggggcacatctgaatttacgcaaagtcccttcgcttgaggcaggtatgtcacccatggcaatttggtcaaatgaagcacaagagcgttatgtgcttgccattcgccctgaaagtgaggcactgtttgacagcatttgtagccgtgagcgttgcccttatgccattttaggcacagcaaccacagtgcgtcaactgatcgttgatgatagcttgcttccagagcgtcctgtggatatgccgatgcaggttttattgggcggcacccccaaaatgaagcgaagctttaatcgtaccgaattcgcccttaagcccttagatacagcttcggtgaatatcaaagacagcattaaagatgtgttgcgtcatcccacagttgccagcaagtcttttttaatctctatcggcgaccgctcgattacaggtatggttacccaagatcaatatgttggtcgttatcaggtgcctgtcgcagattgtgcggttactagtaccgccttaaatgctatcacaggtgaggccatggcaatgggtgagcgtgcacctgttgcactcatcaacccagcagcttctgcacgcttagcagtcgctgaagcggtgacgaatattgcctcagcccgcattgataaaatcagcgacattactttgtctgccaactggatggccgcttgtggcgatgaaaaagaagatgcggcattatttgatgcggttcatgctgtgggcgaagagctatgcccagcacttggtattgccattccagtgggcaaagacagcttatcgatgaaagcagtttggagcgaagatggtgttgaaaaatcagttacctcaccgatgagtctgattattacagcctttgcccctgttcaagatgtgtcaggtacactcaccgctgccttaaataataccgattcggcattgtatcgcattgacttgtcatcaggtaaatttcgtttgggtggctcaattttggcgcaaacattaaatcagctgggctgtgattgtccagatttggagcgaccagaggatttggccaatttctttgcttttattcaggcggcagcaaaagcaggcgtcattcaagcttatcatgacattggtgatggtggtttaattgcttcggtggcagagatgcagtttgccagtcgtatggcgattacccttgcacttagtgatgaaaatttgctcggtcagttatttgctgaggagttaggtgctgtggttcaagtattgcctgatgatgtgccagcatttgttgatttggccaaaacgcatggcgttagtgagtttgtcagcttaattggtcaagccaaaacaaccccagcaggcggtgctggtcttgatgtgttaagcattaccacaccaagtcagacattgtcttttactcgtagcgagcttcaaaaacagtggacaaaagttagccatgccatccaaagtttgcgtgataatccaatctgtgccgatcaagagtttgctttaattgatgatatgaatcatcatggcttgattgccgatgccaattatgatttggatttggcggtagaagctccctatgtcaatagccgtactacccaaccaaaagttgccatcttgcgtgagcagggcgttaatggacatctagagatgggtgcaggttttgtgcgtgcaggttttgatgccattgatgtgcatatgagcgatctgatgagtggacgaattaacctgcgtgattttgagggtttggtggcatgtggcggttttagttacggtgatgtgctgggtgcaggttctggctgggcaaactcaatattatttcatgatgagatgcggatgcagtttgccagattcttccatcgccccgaaacttttgccctaggcgtctgtaatggctgccagatgatgagccagctaaaagacttgatggttggtgctgagagtttccctcgttttattgccaataaatctgctcgttttgaggcgcgcacagtgaatgtacggattgagcgtaccaaatctgtattgctcaaagggatgcaagatagcattctgcctgtcgctattgcccacggtgagggttatgccaatttagatgataaatcgatggcagacctaacttatcatggtcaaatcgcacttcgttatgttgatagccaaggcaatccaactgagcattatccactaaaccccaatggctcaccgcagggcatcacgggcatttgtagtaatgatggccgtgttactttaatgatgccacatcctgagcgtaccctacgcgccgtaaatcactcttggaagcctgatgaatggaccaatgatggtgcatggatgcgattattccgtaatgcacgcgcatttttgcgttaatttggcttatgtcgacatgacttcaaccccaaatcgatatgatttggggtttttagatagatttgccaagcatctaaacacggatagattgccatttttgaaacaaattgtaacaaatgaatgctgtaattgtttaaatacgctgatggctataaataatatgctttataattattgctgcgtcttaaattgactaaacaacttgggattatcatgactggctggtgcagcagtataactgtgcatgataaagtgtgaaatttgccctgataggaatacttatggaaattactttaaatggctactatacgctgattttagcgacgctggtattattactggggcgtcttttggtcaagaaaattaagtttttgggggattttaatattcctgagccggttgcaggcggtttaattgcagcggtgattgtctattgcctaaattggttttttgggtatagctttatttttcaaaaagagttacaaacagcatgtatgttgatgttttttgcatccatcggtttatcggcagattttggacgcttaaaagcaggcggtaagccattaattatctttttatttgtggtatcaggatttattttacttcaagacgcagttggcgtcggcttagccagtgccttgggcctagatcctttgctgggcttggttgcaggttcagtatctttgacagggggtcacggtacagcaggtgcttggggttatacttttgaggataaatatggtgttgttggtgcaaccaccttaggcattgcgtgtgcaacctatggcttggtggcagggggtattatcggtggacctgtggctaagcgtttgaccaacaagcttggcatcaaaccaacagcccatgcagtcagcccatctaagatggagcaattggcaaatgaccagtcattatacaacaccacgcacaaccttgatgatgatactgcacacaaacaaatgtttgagcgacctgataatattcgcttgattacagcaagctcagccatcgaaactttggcattatttgctgcgtgtttggcatttgcagacattatgacaggtgttgcaaaagatacttggtttgagctaccgacctttgtttgggcgttatttggcggtgtcgtcattcgtaatattttaaccactttctttaattttgatatgtttgatcgtgccatcgatgtatttggtaatgcagcgttatcactgtttttggcgatggctttattatcactcaaactgtgggagttgactggtttggcaggccctgtcttgattatcttggcagcacaaactttggcgatgattggctatgcgtattttattacttttcgtacgatgggcaaagattatgatgctgctgttttggcggcgggtcattgtggatttggtcttggtgcaacaccgaccgccattgccaatatgcaagccatcaccgatcgctatatcccatcacataaggcatttttgattgtgccgatggtgggtgctttttttgtggatcttgtgaatgcaaccattttacaagcttttcttcgtgtgtttggttgattgaatcacaaaacatctgcctataaaaatcccaagcacatcgcttgggatttttattgatacatcaattataataattttttaagcacttttgaattacgactatgatcatagctgcgttgacggtcttttggcagctcatctaccgatacctcgctaaacccttgctcaataaaccaatgggcggtatgagttgtcaaagcgtataactgatggcgtccatggcttcgtgcttgctgctctaaaaaagccaataaatcagcaccacggctgcttttgcgataatcaggatgaatggcaagacttgccacttctgctgattgggcatctagtggataaagtgcggcacagcccaaaatggtgccatcacgctcaatcacattataaaactcaatctcctgctctagacgctcttggctacagcgtaccaagacgccttgttcttcgagaggtttaagtagctcaagcagaccgatgacatcgtttaccgttgcatggcggatctcttcataagggtcatggctaatcaaggtgcctgacccatcacgcgtgaacagctcttcaatcaatgcaccgtctttggcataagagatgatatgagtgcggtgtacgccttggcggcacgcactggcagcacagcgtaaaaagtgcgaaatctcttcatgatcatcacaatctcgcagtaagcgatcgacttcattggggataagttcatgcaacaagcgaccatcttggccgatgataccatcctgctcacctaagaaaatcagtttatcagcttgcagggcaatggctgtggtcagtgctacatcttctgccaatagattaaaaatttcgcccgtaaccgaaaaacctgtcggtcctagtaggacaatatggtcattatccaaattatggcgaatggcatcgacatcaattgagcgtacctcacctgtcatctgataatccataccatctctgatgccgtaagggcgagcggtgacaaaattacccgaaatggcatcaatacgagatccgtacattggggagttagcaagccccatcgacagccgagcttcgatttgtagacgaattgagccgactgcctccaagatggcaggcatagattcatacggtgttacacgcacattctcatgtaggtttgatatcagcttgcgattttgtaaatttttttccacttgtgggcgtacaccatgcacaagcaccaatttgatgcccaagctgtgtagcagtgcaaaatcatgaatcagcgtactaaaattgtcacgagcgaccgcctcatcaccaaacataaccacaaaggttttgccacgatgggtgttaatgtacggggcagaattacgaaaccaatgcacaggtgtgagtgcaggagtgttctgataggtgctgacagaattcatgaatgctccaaagagtcaatggctggtaaaataagaatggcgaacaatatatggcgagagcgtctgatgttggtcaaatgtcccattaataactatcaagataccatcataccatagcaaagttttgggcagatgccaagcgaatttatcagcttgataaggttggcatatgataaaatctaccatcatcgtcgccagttttgagcatgtgtaagtagttaccataattaaacagtcaagaaattcacaccgtcaatcagctgtgctatgcttatgggcacataaaacttgaccaacacaggataaatttatgaaaatttctgctactttttctttgagtgtaatggctttggcgttgtctgcatgtgcaacagcaccaacacaaaccccgccagtggtgaccgaaacgactgctgttgtgcctagcgtttctgacgagacgccatcagtttcaccctcatcacccagaacgacaccaaccgtggtaaccagtgaagatgtcaatgccatcatgaatgcctttattgtacgcagggataatgcccaagaaacacttgagcctgtaactgctcaaagtagtattaaggcaggcgatcttattgaatatcaggtgctacttaccaatgatggtaacaatcgtgtgcgtgatatgcgtgtggctttaagcttgccgcaaggagcagagttcacgggcgtggtatcaccaagtgttggcacgcaagcaagtgcagatggttcacgctttgtctttatgccaattcgcaccacagcagctgacggctctgttcaaaatttgccgtttagtcaatatcaagtattacgctggaatatccaagaccttggtatcggtgcaacagcggttgttaaatatcgtgcggttatcaaataatcagatgaataaataatggattgataccatcatttagcaccaaaataaacaaaactgatagccaatctgatgtttggctatctcatcaatctaaaaacaccaagtcactgccttggctggcttttcgtctaatcaaatggatggatttgtcgggatagggttgggtcttggtgttctttgttagtcgatatctattttatcgataaaacgatacaatcagagtagatacagcttgccagtatggtcgtatttttggttaatcgttttataagaatatactttatagtgtattgataatcattattattcatattataatgattatctatcgtttatctgtcattgattatcttaatcatgttaagataaattatttgggactcattgggcaacttgtcatacaaactttttctaaatacgccttactttctgccagtattttgacattgactttagtcgcttgccaaaaaccagcagataaacccaccgaacctgtgcagcctgcccaaacgcaggatggtcatgagcattacaaaacagatgatgataccatggtggatttgagtgccgaaacggctgaatataagcattgggtagaaggtcagatggagattttattggagcagacacaaaaatttgttgctctgcttgatgcaggtcagcttgaggaagccaaagccttatatccgcatgctcgtatgccatttgaacggtcagagccgattgctgaaatttttggcgaccttgatccacgcattgataaccatgaagctgacttagaagcaggtgaggtttggtcaggctttcatgccattgaaaaaatcttatggacaaaaaatactactgaaggcaccaaagaacttggccagcagctgattgctgatattaaagaattaaaagataaaatcccaactgctgaggtaacgggtaatttgatggtagagggtgcagtggatttactcaacgagatttcaaccacgaaaatcacaggcgaagaagagattttctcaaaaactgacctatatgactttaaggctaatattgaaggggcacaaaaaatctttgaaattttaaccccaaaactacaagctaaaaatcctgatttggttaccgaattaacagaaaaattccaagttgtcaatgatttacttgtcactcaccaagttggtcaacatgattacaaaccttataatgagctaagtgccgatgaaaccaaagctttagccgaagcggtcaataaattgggtgagccattggcacaaatgggcgtggtactacagtaaccgcttatatcagacaatgacgctgctgtatatcaatctaggcaaataaagatacaggctaaactttatttgccattggtatggttagttgggggtatggcaaatgacgataaaacaaccaatcgccgacaatttttaacaaaagtgggtgttggttctgtcgctgttggtattggtacaattggattggcgggatgtcaacaaggtcatgaaagtaaatctgacaggcaaaccgagcatacgcccaaacccaacagtccgcctaccaatcccaagcaggcaggtgaacaaaataccaatgtcaagcactgcttggcagataatcagtatgatttttatggtaaacatcaagcgggtatcatcacgccagcacagcgtagcatctattttttggtcttggatttgcatacagataagttggatgatattaaggaggtttttaaacaatggacacagtatgccgccagattaaccaagggcgataatatcgctccttatggctcaaatccgcatgtgccaccagttgatacaggcgaggctgatagccttggagcgtatggcttgactttaacttttggtatcagcccatcgtttttacaaaaattaaatttaactgataaaaaaccgcctgaatttagcgattcgcccaaattccccagagaccaaatccgcccagaatattcaggggcgatatttgtatccaagcttgcagtgacgatccacaagtcagctttcacgctgttcgccaattggtacgccaagcccgctcaagcgttagtatgcgatggagtcagtcgggatttttaggttttgattcaggcaatcaaaccgctcgcaacttattcgcctttaaagatggtacagccaatagcaacacgcttgatcatgccgataaacatgtttggattcaacagccagactggttaaaagatggtacttatttggtcgttcggtgtatccaaatgcacctagaaacatgggatagaaccagtttaaacggacaagatgaaacctttggccgtcatcgagatagtggtgcgccgattggtcaaagtgatgaatttgcccatctggatatcaccgccaaagatgatgaaggtaattttatcattcctgagatttcacatgcaggacttgctaaacgtagcggattgcagttgcttcgccgttcttattcttatgccagtggcattgatccaaaaacaggtcaatttgatgcaggactgttgtttatttcatttcaaaaatcacccatgcaattcaccgccattcaaagttcacttgggcgggtagataaaatgaatgagtacatcactcacattggtagtgggctatttgcctgttttggtggggtaaaacaaggcgagtatttgggacaaaaattgtttgaataaaacccatcacacagttttataaatctatttagacaaatcgcttggttttggtataccttagggctgtggattgtattgtaaaaaatgaccgataacacggatgatactcaatgtgatcatgtctcttaagtgatctaaaagatatgctcaatggtgatgagtactttggataattaattgctcaatatcacttttatttttgagttttttgaccgcttgccatagctgatgtgcttgagtgtagcctttggtgagcatcgcaagccactgtttatagcgtccaataagaccgttttggttatcagtgatatcattaataaagcttagttgatgctgacataggtctgcccaacccaaatcagacttacctgcgatgatggctgttaagtcagggcgagtgaccgctccacgcccgagcatgagatgatgggtttgtgattgagcgatgcagcgtctggcatgctcagcattccaaatctcaccattagcaatgatgggtaatcctaagtcattaaaaggtgcaattttttcccagtaagcaggtggcttatagccatcgactttggtgcgtgcatgaaccgttagccaatctgcacgagcatccgccaccgcatggccaatctcagctgattgactggtatcagtataaccaaggcgaattttagcagaaactggaatttgagttggtattgcgtcacgcaccgtacgaatgatggtatatagtgttttgggttcttcaagtaaaaccgagccgcctttatgattgttcacggttttggcaggacaaccaaagttaaggtcaatggctttagcccccaaactaaccgccaccaaagcactggctgccatggtttcagggttgttgcccaaaagctgtacatgtacaggcgtgccgctggcagtgcagcctttggtgtgtagctctgggacatatttataaaaaacatgagcaggcagcgggtagtgcgtaactcgaataaattcactgacagcccaatcataaggtgaacccaaatcatacgcaatttgggttaggacacgacgcattaacggatcggtcagcccttccatcggtgcaagtaggcgaacaggattattaaataagtgtgtcttttgcatgtgattatcccagaatcaactttttgtgttgtagagcatgcaacagatcgctgatgtgatgaatgtctaacaggtttttgcctcgtgtacaagccacatacaataggcgtaactcttcaggcgtaattttaacagccaatgagttgatgtcatataaaaaatcatcgctgatttgtacacgattccattcaaggcctttagatttgtgggcagttgagacgacatagtcggcatgacttggcatggtcaggctattaatcgccttggtgatggtggtcgtgccatgttcttcgatgagcttcacccaagtttttaaatccccaccctcaccagtttcactaaattcttgaacttcctgccagtgattaaagtaggcaagttcagggatgccagaggcagatttgccatttctaaggctgtcagcaccttgacaaaatcttaaaattcgatgactatcagcctgcagagcaaccttatgcccaagctttagaccatcaagcaaatggctcatggcagtggcatttgtgcggcataagatggcatcttttgcaccatgaaccaaacttttagctaagattgaagattgattgggattgccctttaagggaatgttttcattgagtgcttttaaaaacacattggcaattctggcaatcggttcaccaaaacgaaacgactgcgtcaatagtgtctgtggatagggcaggcgtttcatggcgtttagagcaccacgccattcatagatttgttgatgagcatcgccaacatagatggtttgtttatcttggcgaatcaaagcacccatcattaaagggtcggcatcttgagcttcgtcaaataaaatgaagtcagcaggaatgatgggatcagacagcgtccacaattttagataaatatcatggctgatgcctgcttgatggcgtgggtcaatggattgtagccaacgctgttcaaaagcaggatataaagtttgttgcaacatcttagcatcagcatcgctcatccaatttggtgcggtgatatgccgtggtgcaggatacgcagaagaggtcttacaaaaggtcgtgatggcttcactgacgatattagcaagcttggcaggcgtgagcgtcactggctttttaatgccatcaatgacccgttcggtgctgatggcacgcagtccaagttcattggctaagcgagatggcgtaagcctaggcaggctaattttggcagtcacatcacgattgacatggcgaaaagccagcgaatgaaaagtttggcaacgaatgttgggcgggaatttattttgtgcatcatgagcaatggctttattaaatgccaaatacagcccacgaccacgcaaattttcgctgatgagcttaagtgtcgtggttttacctgcaccagcataggcaacaattttaaaggattgcccagtttttgccatatcaagtgctgccaactgctctttggtgggggttggtttttggtggtcgttgtacatcatggcgtggatgaatggatgggtaaaagtgcttattataccacagcttagctaaagctttggtagatttcatgacaaccaatcacgccgtatcgattgatccattgtttgattggttagtgtatgatgattaaaggcaatttataaatggttagacagattagacagcctatagcgtcccactaaaagaaaaccgactggcagggtgccacatattcacaaaagtgacaagcttgccttgtgatttggtttgtcgagtgtgtaacaatgtgggctcattgatgggtatttgtagtatctgacaaatggtgtcggatgcaagtttggcatggatttgataatcaccatattcaagaggcacatggtcaatcaaataatcgctggtattaacgatgttaaaatcttgattgataaaatcagcaatgacagaggcattaacccagcgttcttcatattgaatgggcaggtcatcgccatagtgtgcgatgcaaacttggtatagtttatcagtgtaagcaggctgattgtgaaaaaacagcgtatttaaccaatggttgtcaggctgatttaatgccataaaatcaagcgtcttttgtgtgatgacttgagcgtgatagcgatgaaatcgctcacggatatctttggcgatattacgaacctcaatatgggcattattatacttttgctgagctacataagtacctgagccttgacgacgctctaaaacacgctcagcttcaagctctttgatggctcgattgactgtcatgcgtgatacaccaaaatcttcagcaagcgtaatttcagcaggaatcgcaacgccagaagcccaaatacctgcatggatattatccaaaatggcagttttgatgcgtagataggctggggctttattgggggatttgtttggcataatcggtaactaaaaattggttattaaaatcaaacgctacatcaaaatatcagggcttggcgtgcgtgccattgtagtcaatatttgattaaaaataaaggtagttttggctgattttatgacagatttttaaggttaccgcaacatgagtgatgcagcttgtgattaacacatcatatcaatgccaatttattaaatttttcaatggctttattattattgttaaatgattatgataaatcagctatgatataataagctgtgttggcaattttttatcaaaatgttcatcatgcttatgaatgtaatcggtgttattaagttgtcatcaatttcgatcaaatatcaccaatggtaagtatgctctagctagtattgatttgttgctaaattttgactaaccaaaaaattaatcaccagcgaccgtttaacccattttttatgtcagtcaagcatcggctttgctttggtttttatatgacatataacctgactaaatcacccatgactccatcaaaaccttctcaagattctgccaattatttatttttggttctgccacgctttgcactactttgggtctgtgtggcactgattcccgtttcaattttatttcacatttggtggcttttgtttattgctacctgtttgacttgtcttggcgtgtataatatcagccaaaagcgtcatgcaattttgcgtaactatcccatcagtgggcatattcgctttttgtttgaaaattttcgcccagaggtacgccagtattttatcgagggtgaccgagaagaagtaccattttcacgcatgcagcgttcaatcgtatatcagcgtgctaaggatgttgatagtactaccgcttttggtagtctaaatgacttgaccaaacctggcacagattggtttttacattctggtcgtagccatacaattaaaaatcatgattttcgggtgcgtgttggtaatgaacgctgtcgacaaccatatgatttatcggtctttaacatctcagcaatgagctttggggcattgtccgcagcagcgattgaatcattaaataaaggtgctaaagaaggtgggtttgcacatgacacaggtgaggggagtattagcccttatcatcaaaaacacggcggtgatttgatttggcaattagggacggcctattttggttgtcgtgatgacaaggggcgatttaaccccgaggcatttcgtcaaagggcggtcttgtcgcaagttaagatgattgagattaaattatcacaaggtgctaagcctggtaaaggtggcgtcttgcctgcctcaaaaattaccactgaaattgcattgactcgtgatattccgatgggtatcgattgtatttcgccgcctacccacccagagtttagtacacccactgagcttgtgcatttttggcaacgcctgcgtgagctatctggtggaaaacctgtcggctttaagctttgtatcggtatgccgtgggagtttatggcaattgttaaagccatgattaaagaagataattaccctgattttattgtcattgatggagctgaaggcggaacaggtgcagcacccatcgagtttatggattcggttgggatgcctttggtggacgcactgatttttgtccaaaatacgctggttggtgcaggtatccgtgacaaaatcaaggtaggcgtgagtggtaaggtgatttcaggatttgatattgcaagattgatgagtttgggtgctgattggtgcaattcagcgcgtgggtttatgtttgctgtaggctgtattcaatctcgttcatgccatacaaataaatgcccaacaggggttgccacccaagaccctgcacgccaaaaagccattgatattcctgataaatctcgccgtgtatctaattttcataaaaataccctaaaggcattggctgagattgttggttgtgcaggtctatctcacccaaccgaactaaaaccacatcacattgtacgccgacaaccagatggctggattaagctattatctgagcattatcaattcatcgaaacaggttcgttgttaacgggtgattgtggtcgccgtgtgttagatgatatgtggaagcttgccgatccaaacagctttcaggcgatgacgattgcagataagattgttggtgctgaaaataaacgcaaccgcacgatagaaagtctgtattaataaaaactgatggcaaatcaattgaccaagatagatatccagtaaatgagtgtcaagcaatcagaggtttcatgtgaaaccatcaaaaaagccaagccaacggacttggctttttatttttaaggcgtgttcttagtgttaatttgatcgctacttatttgattttttaggcaaaatggttggttttgggtggtgtttatcctatggtgctttgggtgttttgactaacaattttgccatgataagcccaagttcaaacagtaaacacatcggaatggcaagcatgagcatactggcaccatcaggcggtgtaatcacggcggcgacagcaaaacagcccacgataatgtagcggcgtttatttgtcaaacttgcaatgctgacaagacgcatcaaaaccaaaatcagcgttaccacaggaatttcaaacatcacgccaaataccaaaaggagttttatcacaaagtttaggtaactgtcgatatcggtcattggtagcacattgtcgggagcaaatacaacaaaaaatttcagtgcaggcactaatacgataaaataagcaaatgtcacaccaagataaaataaagcaatggatgaaaataataagggcaaggcggtacgcttttcgtgatgataaagaccaggtgagataaaaccccaaatctgcattaaaataaaaggtactgtgataaatagtgcggtaaaaaatgtcaaacgaatgggtgccaaaaaaccagaggcgacatcggtggcaattaagcttgattcattgggcagtagagcgaccaaaggatttgagattaagtcatacagttcacggctaaagccaaccaacgccaaaaatacaaccaaaactgccaaaaagatgcggataaatcgtccacgaagttcgataaaatgtgacatcaatgagacatcgtctgtgggtggattgggtgacttcatgggcggcggttgggttgatttaataaggggtcggcaatatgatttggcaagtagggtgcaggcggtagacggcgacggcgatcatagctactcatcaaaaaccaatggtttatcatcggcagtgtgagtgctgctctgatagcgtgggtttcttggaggtttttatcatcatcacattctacctgaataccaaaatcatcatgattgggcagctctttggctggctgatttttttgggtattttgttgttgggtcttggtgcgatcaagtgaccgctctagtgcattcatttgggcttttatgcgtgcttcagactggcgaatctcatcaagctcttttttgagcatttgctgggtttcaagtaattgtagttcattagtaatttcagtttgaagcttttgactggcacggtgaaacatgccataccatcgcccaagtgtgcgtgcagcgacaggcagcttatcaggacctagaacaatcaaagcaatgataccaaataaggttaattcaaaaaaaccaagattaccaatcataagtcagctgagcgattatctttgggtttttcgactttaacttcttcggcaatgatgactttgccatcattattggtaatctttggcttttcttcttctttgacagcttctttaaatccttttaccgcactgcccaagtctttgccagcattttttaatttgctggtgccaaatatgataaccacaaccacaagtaaaattaaccagtgcgtaatagaaagtgaacccataaactacccccttaattgtcttaattgtcattaaaaattagtaagccaagcgtgatgatcgtgctattttgtacgactgtttttttcttcgatgcctgagataccaaagcggcgagccagctcatcaatgacatcttgagcagataagcccaatttggataaggcaaccatttgatgaaaccaagtatctgccacttcataaaccaaatcatgtgccagcttatcacagttttcgttggtatttttggcacgctcaagctctttggccgcaatgatgctttcaaccgcttcttcacccactttttctaagattttattgagccctttatggtataaacttgccacataagagttgtctttattggcatttttacgctcatttaaggttgcatcaagacggctaagcacatcagatgaagattgggttatggtcgctgtgatattgctagcattatttttggtggctgtttgttggttgttaccataaatttgatcagggtctttgatgacatggttggtaatttgccagttgccctgatcatcgagttttttaaaaaagcaggaacgacgccctgtgtgacaggcaatcccaccaatttgcgtgatagataagatgatgacatcatgatcacaatcggtataaatatcatgaacaatttgcgtatgccctgaggtttcgcctttatgccaaagcttaccacgagagcgtgaaaaataaacggcttctttggtttttaaggtttgttctaacgccattttattttgccaagcgaccatcatgacctgacctgtttggcggtcttgtgcgatggcgggaatgagtccttgctcattaaacttgagtgtatcaagccagtgtgtattgatagtcatgggtatttattggaatagtgttgccatgttttgtaacattaatgcaagtcgctgcacgaaaatttgctgtcttagggtgtttgttttaagtgctattataacgcttgcaacaaggcaagtaaagacagatactgcttgttttatgcatcataatttgctataattttttatcccaccttccgcttgtgttgcttttgacataggtgacataggcaataaggttcattgttgggataccaactttaatttaagaggtcattatgaaacttataaccaaacgcggtgccgccaagcgtttcaaaaaaaccgccagggcatcca

What is claimed is:

1. A purified or isolated nucleic acid consisting essentially of a nucleotide sequence that encodes the same UDP-N-acetylmuramoylalanine-D-glutamate ligase encoded by nucleotides 11357 to 12736 of SEQ ID NO:35 or a nucleotide sequence fully complementary thereto.

2. The purified or isolated nucleic acid of claim 1, wherein said nucleic acid sequence consists essentially of nucleotides 11357 to 12736 of SEQ ID NO:35 or a nucleotide sequence fully complementary thereto.

3. A purified or isolated oligonucleotide consisting essentially of a fragment of a nucleic acid having the nucleotide sequence of nucleotides 11357 to 12736 of SEQ ID NO:35 or a sequence complementary thereto, wherein said oligonucleotide is at least 22 nucleotides in length.

4. A recombinant construct comprising a nucleotide sequence that encodes the same UDP-N-acetylmuramoylalanine-D-glutamate ligase encoded by nucleotides 11357 to 12736 of SEQ ID NO:35, or a nucleotide sequence fully complementary thereto, operably linked to a promoter.

5. A method of making UDP-N-acetylmuramoylalanine-D-glutamate ligase of Moraxella catarrahalis comprising:
obtaining a nucleic acid consisting essentially of a nucleotide sequence that encodes the same UDP-N-acetylmuramoylalanine-D-glutamate ligase encoded by nucleotides 11357 to 12736 of SEQ ID NO:35;
inserting said nucleic acid in an expression vector such that said nucleic acid is operably linked to a promoter; and
introducing said expression vector into a host cell whereby said host cell produces the protein encoded by said nucleic acid.

6. The method of claim 5, further comprising isolating the protein.

7. The method of claim 5, wherein said nucleic acid sequence consists essentially of nucleotides 11357 to 12736 of SEQ ID NO:35 or a nucleotide sequence fully complementary thereto.

8. A method for constructing a host cell that expresses UDP-Nacetylmuramoylalanine-D-glutamate ligase of Moraxella catarrahalis comprising introducing a recombinant construct comprising a promoter operably linked to a nucleic acid comprising a nucleotide sequence that encodes the same UDP-N-acetylmuramoylalanine-D-glutamate ligase encoded by nucleotides 11357 to 12736 of SEQ ID NO:35 into said cell.

9. The method of claim 8, wherein said nucleic acid sequence consists essentially of nucleotides 11357 to 12736 of SEQ ID NO:35 or a nucleotide sequence fully complementary thereto.

10. A vector comprising the purified or isolated nucleic acid of claim 1

11. The vector of claim 10, wherein the isolated nucleic acid is operably linked to a promoter.

12. The vector of claim 11, wherein the vector is an expression vector.

13. A cultured cell line comprising the vector of claim 10.

14. A vector comprising the purified or isolated nucleic acid of claim 2.

15. The vector of claim 14, wherein the isolated nucleic acid is operably linked to a promoter.

16. The vector of claim 15, wherein the vector is an expression vector.

17. A cultured cell line comprising the vector of claim 14.

18. An isolated expression construct comprising nucleotides 11357 to 12736 of SEQ ID NO:35, which encodes UDP-N-acetylmuramoylalanine-D-glutamate ligase, or a nucleotide sequence fully complementary thereto, operably linked to a promoter.

19. A purified or isolated nucleic acid consisting essentially of a nucleic acid sequence which hybridizes under high stringency to nucleotides 11357 to 12736 of SEQ ID NO:35 and which encodes UDP-N-acetylmuramoylalanine-D-glutamate ligase.

20. A purified or isolated nucleic acid which hybridizes substantially over the entire length to nucleotides 11357 to 12736 of SEQ ID NO:35 or a sequence complementary thereto under the following conditions: 5×SSC with 1% SDS at 60° C.; and washing with 0.2×SSC with 0.1% SDS at either 45 C or 68° C. or 0.5M sodium phospahate (pH 7.2), 7% SDS, and 1 mM EDTA at 65° C.; and washing with 40 mM sodium phosphate, 1% SDS, 1 mM EDTA at 65° C.
